(19) United States
(12) Patent Application Publication
(10) Pub. No.: US 2003/0069180 A1
(43) Pub. Date: Apr. 10, 2003

(54) Compositions and methods for the therapy and diagnosis of colon cancer

(75) Inventors: Yuqiu Jiang, Kent, WA (US); Susan L. Harlocker, Seattle, WA (US); Heather Secrist, Seattle, WA (US); Aijun Wang, Issaquah, WA (US); John A. Stolk, Bothell, WA (US)

Correspondence Address: SEED INTELLECTUAL PROPERTY LAW GROUP PLLC, 701 FIFTH AVE, SUITE 6300, SEATTLE, WA, 98104-7092, US

(73) Assignee: Corixa Corporation, Seattle, WA

(21) Appl. No.: 10/146,502

(22) Filed: May 14, 2002

Related U.S. Application Data
(63) Continuation-in-part of application No. 10/046,935, filed on Jan. 15, 2002.
Application No. 10/046,935 is a continuation-in-part of application No. 09/878,178, filed on Jun. 8, 2001.
(60) Provisional application No. 60/270,216, filed on Feb. 20, 2001.
(60) Provisional application No. 60/210,899, filed on Jun. 9, 2000.

(51) Int. Cl. A61K 38/17; G01N 33/574; C07H 21/04; C12P 21/02; C12N 5/06; C07K 14/435

(52) U.S. Cl. 514/12; 435/7.23; 435/69.3; 435/325; 435/320.1; 530/350; 536/23.2

(57) ABSTRACT

Compositions and methods for the therapy and diagnosis of cancer, such as colon cancer, are disclosed. Compositions may comprise one or more colon tumor proteins, immunogenic portions thereof, or polynucleotides that encode such portions. Alternatively, a therapeutic composition may comprise an antigen presenting cell that expresses a colon tumor protein, or a T cell that is specific for cells expressing such a protein. Such compositions may be used, for example, for the prevention and treatment of diseases such as colon cancer. Diagnostic methods based on detecting a colon tumor protein, or mRNA encoding such a protein, in a sample are also provided.

### STATEMENT REGARDING SEQUENCE LISTING

[0001] The Sequence Listing associated with this application is provided on CD-ROM in lieu of a paper copy, and is hereby incorporated by reference into the specification. Three CD-ROMs are provided, containing identical copies of the sequence listing: CD-ROM No. 1 is labeled COPY 1, contains the file 527c2.app which is 1.2 MB and created on May 14, 2002; CD-ROM No. 2 is labeled COPY 2, contains the file 527c2.app which is 1.2 MB and created on May 14, 2002; CD-ROM No. 3 is labeled CRF, contains the file 527c2.app which is 1.2 MB and created on May 14, 2002.

### BACKGROUND OF THE INVENTION

[0002] 1. Field of the Invention

[0003] The present invention relates generally to therapy and diagnosis of cancer, such as colon cancer. The invention is more specifically related to polypeptides comprising at least a portion of a colon tumor protein, and to polynucleotides encoding such polypeptides. Such polypeptides and polynucleotides may be used in vaccines and pharmaceutical compositions for prevention and treatment of colon malignancies, and for the diagnosis and monitoring of such cancers.

[0004] 2. Description of the Related Art

[0005] Cancer is a significant health problem throughout the world. Although advances have been made in detection and therapy of cancer, no vaccine or other universally successful method for prevention or treatment is currently available. Current therapies, which are generally based on a combination of chemotherapy or surgery and radiation, continue to prove inadequate in many patients.

[0006] Colon cancer is the second most frequently diagnosed malignancy in the United States as well as the second most common cause of cancer death. The five-year survival rate for patients with colorectal cancer detected in an early localized stage is 92%; unfortunately, only 37% of colorectal cancer is diagnosed at this stage. The survival rate drops to 64% if the cancer is allowed to spread to adjacent organs or lymph nodes, and to 7% in patients with distant metastases.

[0007] The prognosis of colon cancer is directly related to the degree of penetration of the tumor through the bowel wall and the presence or absence of nodal involvement, consequently early detection and treatment are especially important. Currently, diagnosis is aided by the use of screening assays for fecal occult blood, sigmoidoscopy, colonoscopy and double contrast barium enemas. Treatment regimens are determined by the type and stage of the cancer, and include surgery, radiation therapy and/or chemotherapy. Recurrence following surgery (the most common form of therapy) is a major problem and is often the ultimate cause of death.

[0008] In spite of considerable research into therapies for these and other cancers, colon cancer remains difficult to diagnose and treat effectively. Accordingly, there is a need in the art for improved methods for detecting and treating such cancers. The present invention fulfills these needs and further provides other related advantages.

### BRIEF SUMMARY OF THE INVENTION

[0009] In one aspect, the present invention provides polynucleotide compositions comprising a sequence selected from the group consisting of:

[0010] (a) sequences provided in SEQ ID NOs:1-2234, 2238 and 2240-2241;

[0011] (b) complements of the sequences provided in SEQ ID NOs:1-2234, 2238 and 2240-2241;

[0012] (c) sequences consisting of at least 20, 25, 30, 35, 40, 45, 50, 75 and 100 contiguous residues of a sequence provided in SEQ ID NOs:1-2234, 2238 and 2240-2241;

[0013] (d) sequences that hybridize to a sequence provided in SEQ ID NOs:1-2234, 2238 and 2240-2241, under moderate or highly stringent conditions;

[0014] (e) sequences having at least 75%, 80%, 85%, 90%, 95%, 96%, 97%, 98% or 99% identity to a sequence of SEQ ID NOs:1-2234, 2238 and 2240-2241;

[0015] (f) degenerate variants of a sequence provided in SEQ ID NOs:1-2234, 2238 and 2240-2241.

[0016] In one preferred embodiment, the polynucleotide compositions of the invention are expressed in at least about 20%, more preferably in at least about 30%, and most preferably in at least about 50% of colon tumor samples tested, at a level that is at least about 2-fold, preferably at least about 5-fold, and most preferably at least about 10-fold higher than that for normal tissues.

[0017] The present invention, in another aspect, provides polypeptide compositions comprising an amino acid sequence that is encoded by a polynucleotide sequence described above.

[0018] The present invention further provides polypeptide compositions comprising an amino acid sequence selected from the group consisting of the sequences recited in SEQ ID NOs:2235 and 2239.

[0019] In certain preferred embodiments, the polypeptides and/or polynucleotides of the present invention are immunogenic, i.e., they are capable of eliciting an immune response, particularly a humoral and/or cellular immune response, as further described herein.

[0020] The present invention further provides fragments, variants and/or derivatives of the disclosed polypeptide and/or polynucleotide sequences, wherein the fragments, variants and/or derivatives preferably have a level of immunogenic activity of at least about 50%, preferably at least about 70% and more preferably at least about 90% of the level of immunogenic activity of a polypeptide sequence set forth in SEQ ID NOs:2235 and 2239 or a polypeptide sequence encoded by a polynucleotide sequence set forth in SEQ ID NOs:1-2234, 2238 and 2240-2241.

[0021] The present invention further provides polynucleotides that encode a polypeptide described above, expression vectors comprising such polynucleotides and host cells transformed or transfected with such expression vectors.

[0022] Within other aspects, the present invention provides pharmaceutical compositions comprising a polypeptide or polynucleotide as described above and a physiologically acceptable carrier.

[0023] Within a related aspect of the present invention, the pharmaceutical compositions, e.g., vaccine compositions, are provided for prophylactic or therapeutic applications. Such compositions generally comprise an immunogenic polypeptide or polynucleotide of the invention and an immunostimulant, such as an adjuvant.

[0024] The present invention further provides pharmaceutical compositions that comprise: (a) an antibody or antigen-binding fragment thereof that specifically binds to a polypeptide of the present invention, or a fragment thereof; and (b) a physiologically acceptable carrier.

[0025] Within further aspects, the present invention provides pharmaceutical compositions comprising: (a) an antigen presenting cell that expresses a polypeptide as described above and (b) a pharmaceutically acceptable carrier or excipient. Illustrative antigen presenting cells include dendritic cells, macrophages, monocytes, fibroblasts and B cells.

[0026] Within related aspects, pharmaceutical compositions are provided that comprise: (a) an antigen presenting cell that expresses a polypeptide as described above and (b) an immunostimulant.

[0027] The present invention further provides, in other aspects, fusion proteins that comprise at least one polypeptide as described above, as well as polynucleotides encoding such fusion proteins, typically in the form of pharmaceutical compositions, e.g., vaccine compositions, comprising a physiologically acceptable carrier and/or an immunostimulant. The fusions proteins may comprise multiple immunogenic polypeptides or portions/variants thereof, as described herein, and may further comprise one or more polypeptide segments for facilitating the expression, purification and/or immunogenicity of the polypeptide(s).

[0028] Within further aspects, the present invention provides methods for stimulating an immune response in a patient, preferably a T cell response in a human patient, comprising administering a pharmaceutical composition described herein. The patient may be afflicted with colon cancer, in which case the methods provide treatment for the disease, or patient considered at risk for such a disease may be treated prophylactically.

[0029] Within further aspects, the present invention provides methods for inhibiting the development of a cancer in a patient, comprising administering to a patient a pharmaceutical composition as recited above. The patient may be afflicted with colon cancer, in which case the methods provide treatment for the disease, or patient considered at risk for such a disease may be treated prophylactically.

[0030] The present invention further provides, within other aspects, methods for removing tumor cells from a biological sample, comprising contacting a biological sample with T cells that specifically react with a polypeptide of the present invention, wherein the step of contacting is performed under conditions and for a time sufficient to permit the removal of cells expressing the protein from the sample.

[0031] Within related aspects, methods are provided for inhibiting the development of a cancer in a patient, comprising administering to a patient a biological sample treated as described above.

[0032] Methods are further provided, within other aspects, for stimulating and/or expanding T cells specific for a polypeptide of the present invention, comprising contacting T cells with one or more of: (i) a polypeptide as described above; (ii) a polynucleotide encoding such a polypeptide; and/or (iii) an antigen presenting cell that expresses such a polypeptide; under conditions and for a time sufficient to permit the stimulation and/or expansion of T cells. Isolated T cell populations comprising T cells prepared as described above are also provided.

[0033] Within further aspects, the present invention provides methods for inhibiting the development of a cancer in a patient, comprising administering to a patient an effective amount of a T cell population as described above.

[0034] The present invention further provides methods for inhibiting the development of a cancer in a patient, comprising the steps of: (a) incubating CD4⁺ and/or CD8⁺ T cells isolated from a patient with one or more of: (i) a polypeptide comprising at least an immunogenic portion of polypeptide disclosed herein; (ii) a polynucleotide encoding such a polypeptide; and (iii) an antigen-presenting cell that expressed such a polypeptide; and (b) administering to the patient an effective amount of the proliferated T cells, and thereby inhibiting the development of a cancer in the patient. Proliferated cells may, but need not, be cloned prior to administration to the patient.

[0035] Within further aspects, the present invention provides methods for determining the presence or absence of a cancer, preferably a colon cancer, in a patient comprising: (a) contacting a biological sample obtained from a patient with a binding agent that binds to a polypeptide as recited above; (b) detecting in the sample an amount of polypeptide that binds to the binding agent; and (c) comparing the amount of polypeptide with a predetermined cut-off value, and therefrom determining the presence or absence of a cancer in the patient. Within preferred embodiments, the binding agent is an antibody, more preferably a monoclonal antibody.

[0036] The present invention also provides, within other aspects, methods for monitoring the progression of a cancer in a patient. Such methods comprise the steps of: (a) contacting a biological sample obtained from a patient at a first point in time with a binding agent that binds to a polypeptide as recited above; (b) detecting in the sample an amount of polypeptide that binds to the binding agent; (c) repeating steps (a) and (b) using a biological sample obtained from the patient at a subsequent point in time; and (d) comparing the amount of polypeptide detected in step (c) with the amount detected in step (b) and therefrom monitoring the progression of the cancer in the patient.

[0037] The present invention further provides, within other aspects, methods for determining the presence or absence of a cancer in a patient, comprising the steps of: (a) contacting a biological sample, e.g., tumor sample, serum sample, etc., obtained from a patient with an oligonucleotide that hybridizes to a polynucleotide that encodes a polypeptide of the present invention; (b) detecting in the sample a level of a polynucleotide, preferably mRNA, that hybridizes to the oligonucleotide; and (c) comparing the level of polynucleotide that hybridizes to the oligonucleotide with a predetermined cut-off value, and therefrom determining the presence or absence of a cancer in the patient. Within certain embodiments, the amount of mRNA is detected via polymerase chain reaction using, for example, at least one oligonucleotide primer that hybridizes to a polynucleotide encoding a polypeptide as recited above, or a complement of such a polynucleotide. Within other embodiments, the amount of mRNA is detected using a hybridization technique, employing an oligonucleotide probe that hybridizes to a polynucleotide that encodes a polypeptide as recited above, or a complement of such a polynucleotide.

[0038] In related aspects, methods are provided for monitoring the progression of a cancer in a patient, comprising the steps of: (a) contacting a biological sample obtained from a patient with an oligonucleotide that hybridizes to a polynucleotide that encodes a polypeptide of the present invention; (b) detecting in the sample an amount of a polynucleotide that hybridizes to the oligonucleotide; (c) repeating steps (a) and (b) using a biological sample obtained from the patient at a subsequent point in time; and (d) comparing the amount of polynucleotide detected in step (c) with the amount detected in step (b) and therefrom monitoring the progression of the cancer in the patient.

[0039] Within further aspects, the present invention provides antibodies, such as monoclonal antibodies, that bind to a polypeptide as described above, as well as diagnostic kits comprising such antibodies. Diagnostic kits comprising one or more oligonucleotide probes or primers as described above are also provided.

[0040] These and other aspects of the present invention will become apparent upon reference to the following detailed description. All references disclosed herein are hereby incorporated by reference in their entirety as if each was incorporated individually.

### BRIEF DESCRIPTION OF THE SEQUENCE IDENTIFIERS

[0041] SEQ ID NOs:1-2231 are the cDNA sequences of clones identified from the PCR subtracted differential colon tumor and colon metastatic tumor cDNA libraries as described in Example 1.

[0042] SEQ ID NO:2232 is the determined full-length consensus cDNA sequence for C931P.

[0043] SEQ ID NO:2233 is the determined cDNA sequence of a partially spliced form of C931P.

[0044] SEQ ID NO:2234 is the determined cDNA of the predicted coding portion of C931P.

[0045] SEQ ID NO:2235 is the predicted C931P full-length protein sequence.

[0046] SEQ ID NO:2236 is a PCR primer.

[0047] SEQ ID NO:2237 is a PCR primer.

[0048] SEQ ID NO:2238 is the determined cDNA sequence of the C931P-pET28b expression contstruct.

[0049] SEQ ID NO:2239 is the predicted amino acid sequence of the recombinant C931P-pET28b expression protein.

[0050] SEQ ID NO:2240 is the determined cDNA sequence of the open reading frame of C931P in the pCEP4 expression construct.

[0051] SEQ ID NO:2241 is the determined cDNA sequence of the open reading frame of C931P with a FLAG tag in the pCEP4 expression construct.

### DETAILED DESCRIPTION OF THE INVENTION

[0052] The present invention is directed generally to compositions and their use in the therapy and diagnosis of cancer, particularly colon cancer. As described further below, illustrative compositions of the present invention include, but are not restricted to, polypeptides, particularly immunogenic polypeptides, polynucleotides encoding such polypeptides, antibodies and other binding agents, antigen presenting cells (APCs) and immune system cells (e.g., T cells).

[0053] The practice of the present invention will employ, unless indicated specifically to the contrary, conventional methods of virology, immunology, microbiology, molecular biology and recombinant DNA techniques within the skill of the art, many of which are described below for the purpose of illustration. Such techniques are explained fully in the literature. See, e.g., Sambrook, et al. Molecular Cloning: A Laboratory Manual (2nd Edition, 1989); Maniatis et al. Molecular Cloning: A Laboratory Manual (1982); DNA Cloning: A Practical Approach, vol. I & II (D. Glover, ed.); Oligonucleotide Synthesis (N. Gait, ed., 1984); Nucleic Acid Hybridization (B. Hames & S. Higgins, eds., 1985); Transcription and Translation (B. Hames & S. Higgins, eds., 1984); Animal Cell Culture (R. Freshney, ed., 1986); Perbal, A Practical Guide to Molecular Cloning (1984).

[0054] U.S. patents, U.S. patent application publications, U.S. patent applications, foreign patents, foreign patent applications and non-patent publications referred to in this specification and/or listed in the Application Data Sheet, are incorporated herein by reference, in their entirety.

[0055] As used in this specification and the appended claims, the singular forms “a,” “an” and “the” include plural references unless the content clearly dictates otherwise.

[0056] Polypeptide Compositions

[0057] As used herein, the term “polypeptide” is used in its conventional meaning, i.e., as a sequence of amino acids. The polypeptides are not limited to a specific length of the product; thus, peptides, oligopeptides, and proteins are included within the definition of polypeptide, and such terms may be used interchangeably herein unless specifically indicated otherwise. This term also does not refer to or exclude post-expression modifications of the polypeptide, for example, glycosylations, acetylations, phosphorylations and the like, as well as other modifications known in the art, both naturally occurring and non-naturally occurring. A polypeptide may be an entire protein, or a subsequence thereof. Particular polypeptides of interest in the context of this invention are amino acid subsequences comprising epitopes, i.e., antigenic determinants substantially responsible for the immunogenic properties of a polypeptide and being capable of evoking an immune response.

[0058] Particularly illustrative polypeptides of the present invention comprise those encoded by a polynucleotide sequence set forth in any one of SEQ ID NOs:1-2234, 2238 and 2240-2241, or a sequence that hybridizes under moderately stringent conditions, or, alternatively, under highly stringent conditions, to a polynucleotide sequence set forth in any one of SEQ ID NOs:1-2234, 2238 and 2240-2241. Certain other illustrative polypeptides of the invention comprise amino acid sequences as set forth in SEQ ID NOs:2235 and 2239.

[0059] The polypeptides of the present invention are sometimes herein referred to as colon tumor proteins or colon tumor polypeptides, as an indication that their identification has been based at least in part upon their increased levels of expression in colon tumor samples. Thus, a “colon tumor polypeptide” or “colon tumor protein,” refers generally to a polypeptide sequence of the present invention, or a polynucleotide sequence encoding such a polypeptide, that is expressed in a substantial proportion of colon tumor samples, for example preferably greater than about 20%, more preferably greater than about 30%, and most preferably greater than about 50% or more of colon tumor samples tested, at a level that is at least two fold, and preferably at least five fold, greater than the level of expression in normal tissues, as determined using a representative assay provided herein. A colon tumor polypeptide sequence of the invention, based upon its increased level of expression in tumor cells, has particular utility both as a diagnostic marker as well as a therapeutic target, as further described below.

[0060] In certain preferred embodiments, the polypeptides of the invention are immunogenic, i.e., they react detectably within an immunoassay (such as an ELISA or T-cell stimulation assay) with antisera and/or T-cells from a patient with colon cancer. Screening for immunogenic activity can be performed using techniques well known to the skilled artisan. For example, such screens can be performed using methods such as those described in Harlow and Lane, Antibodies: A Laboratory Manual, Cold Spring Harbor Laboratory, 1988. In one illustrative example, a polypeptide may be immobilized on a solid support and contacted with patient sera to allow binding of antibodies within the sera to the immobilized polypeptide. Unbound sera may then be removed and bound antibodies detected using, for example, ¹²⁵I-labeled Protein A.

[0061] As would be recognized by the skilled artisan, immunogenic portions of the polypeptides disclosed herein are also encompassed by the present invention. An “immunogenic portion,” as used herein, is a fragment of an immunogenic polypeptide of the invention that itself is immunologically reactive (i.e., specifically binds) with the B-cells and/or T-cell surface antigen receptors that recognize the polypeptide. Immunogenic portions may generally be identified using well known techniques, such as those summarized in Paul, Fundamental Immunology, 3rd ed., 243-247 (Raven Press, 1993) and references cited therein. Such techniques include screening polypeptides for the ability to react with antigen-specific antibodies, antisera and/or T-cell lines or clones. As used herein, antisera and antibodies are “antigen-specific” if they specifically bind to an antigen (i.e., they react with the protein in an ELISA or other immunoassay, and do not react detectably with unrelated proteins). Such antisera and antibodies may be prepared as described herein, and using well-known techniques.

[0062] In one preferred embodiment, an immunogenic portion of a polypeptide of the present invention is a portion that reacts with antisera and/or T-cells at a level that is not substantially less than the reactivity of the full-length polypeptide (e.g., in an ELISA and/or T-cell reactivity assay). Preferably, the level of immunogenic activity of the immunogenic portion is at least about 50%, preferably at least about 70% and most preferably greater than about 90% of the immunogenicity for the full-length polypeptide. In some instances, preferred immunogenic portions will be identified that have a level of immunogenic activity greater than that of the corresponding full-length polypeptide, e.g., having greater than about 100% or 150% or more immunogenic activity.

[0063] In certain other embodiments, illustrative immunogenic portions may include peptides in which an N-terminal leader sequence and/or transmembrane domain have been deleted. Other illustrative immunogenic portions will contain a small N- and/or C-terminal deletion (e.g., 1-30 amino acids, preferably 5-15 amino acids), relative to the mature protein.

[0064] In another embodiment, a polypeptide composition of the invention may also comprise one or more polypeptides that are immunologically reactive with T cells and/or antibodies generated against a polypeptide of the invention, particularly a polypeptide having an amino acid sequence disclosed herein, or to an immunogenic fragment or variant thereof.

[0065] In another embodiment of the invention, polypeptides are provided that comprise one or more polypeptides that are capable of eliciting T cells and/or antibodies that are immunologically reactive with one or more polypeptides described herein, or one or more polypeptides encoded by contiguous nucleic acid sequences contained in the polynucleotide sequences disclosed herein, or immunogenic fragments or variants thereof, or to one or more nucleic acid sequences which hybridize to one or more of these sequences under conditions of moderate to high stringency.

[0066] The present invention, in another aspect, provides polypeptide fragments comprising at least about 5, 10, 15, 20, 25, 50, or 100 contiguous amino acids, or more, including all intermediate lengths, of a polypeptide compositions set forth herein, such as those set forth in SEQ ID NOs:2235 and 2239, or those encoded by a polynucleotide sequence set forth in a sequence of SEQ ID NOs:1-2234, 2238 and 2240-2241.

[0067] In another aspect, the present invention provides variants of the polypeptide compositions described herein. Polypeptide variants generally encompassed by the present invention will typically exhibit at least about 70%, 75%, 80%, 85%, 90%, 91%, 92%, 93%, 94%, 95%, 96%, 97%, 98%, or 99% or more identity (determined as described below), along its length, to a polypeptide sequences set forth herein.

[0068] In one preferred embodiment, the polypeptide fragments and variants provided by the present invention are immunologically reactive with an antibody and/or T-cell that reacts with a full-length polypeptide specifically set forth herein.

[0069] In another preferred embodiment, the polypeptide fragments and variants provided by the present invention exhibit a level of immunogenic activity of at least about 50%, preferably at least about 70%, and most preferably at least about 90% or more of that exhibited by a full-length polypeptide sequence specifically set forth herein.

[0070] A polypeptide “variant,” as the term is used herein, is a polypeptide that typically differs from a polypeptide specifically disclosed herein in one or more substitutions, deletions, additions and/or insertions. Such variants may be naturally occurring or may be synthetically generated, for example, by modifying one or more of the above polypeptide sequences of the invention and evaluating their immunogenic activity as described herein and/or using any of a number of techniques well known in the art.

[0071] For example, certain illustrative variants of the polypeptides of the invention include those in which one or more portions, such as an N-terminal leader sequence or transmembrane domain, have been removed. Other illustrative variants include variants in which a small portion (e.g., 1-30 amino acids, preferably 5-15 amino acids) has been removed from the N- and/or C-terminal of the mature protein.

[0072] In many instances, a variant will contain conservative substitutions. A “conservative substitution” is one in which an amino acid is substituted for another amino acid that has similar properties, such that one skilled in the art of peptide chemistry would expect the secondary structure and hydropathic nature of the polypeptide to be substantially unchanged. As described above, modifications may be made in the structure of the polynucleotides and polypeptides of the present invention and still obtain a functional molecule that encodes a variant or derivative polypeptide with desirable characteristics, e.g., with immunogenic characteristics. When it is desired to alter the amino acid sequence of a polypeptide to create an equivalent, or even an improved, immunogenic variant or portion of a polypeptide of the invention, one skilled in the art will typically change one or more of the codons of the encoding DNA sequence according to Table 1.

[0073] For example, certain amino acids may be substituted for other amino acids in a protein structure without appreciable loss of interactive binding capacity with structures such as, for example, antigen-binding regions of antibodies or binding sites on substrate molecules. Since it is the interactive capacity and nature of a protein that defines that protein's biological functional activity, certain amino acid sequence substitutions can be made in a protein sequence, and, of course, its underlying DNA coding sequence, and nevertheless obtain a protein with like properties. It is thus contemplated that various changes may be made in the peptide sequences of the disclosed compositions, or corresponding DNA sequences which encode said peptides without appreciable loss of their biological utility or activity.

TABLE 1

| Amino Acids | | Codons | | | | | | |
|---|---|---|---|---|---|---|---|---|
| Alanine | Ala | A | GCA | GCC | GCG | GCU | | |
| Cysteine | Cys | C | UGC | UGU | | | | |
| Aspartic acid | Asp | D | GAC | GAU | | | | |
| Glutamic acid | Glu | E | GAA | GAG | | | | |
| Phenylalanine | Phe | F | UUC | UUU | | | | |
| Glycine | Gly | G | GGA | GGC | GGG | GGU | | |
| Histidine | His | H | CAC | CAU | | | | |
| Isoleucine | Ile | I | AUA | AUC | AUU | | | |
| Lysine | Lys | K | AAA | AAG | | | | |
| Leucine | Leu | L | UUA | UUG | CUA | CUC | CUG | CUU |
| Methionine | Met | M | AUG | | | | | |
| Asparagine | Asn | N | AAC | AAU | | | | |
| Proline | Pro | P | CCA | CCC | CCG | CCU | | |
| Glutamine | Gln | Q | CAA | CAG | | | | |
| Arginine | Arg | R | AGA | AGG | CGA | CGC | CGG | CGU |
| Serine | Ser | S | AGC | AGU | UCA | UCC | UCG | UCU |
| Threonine | Thr | T | ACA | ACC | ACG | ACU | | |
| Valine | Val | V | GUA | GUC | GUG | GUU | | |
| Tryptophan | Trp | W | UGG | | | | | |
| Tyrosine | Tyr | Y | UAC | UAU | | | | |

[0074] In making such changes, the hydropathic index of amino acids may be considered. The importance of the hydropathic amino acid index in conferring interactive biologic function on a protein is generally understood in the art (Kyte and Doolittle, 1982, incorporated herein by reference). It is accepted that the relative hydropathic character of the amino acid contributes to the secondary structure of the resultant protein, which in turn defines the interaction of the protein with other molecules, for example, enzymes, substrates, receptors, DNA, antibodies, antigens, and the like. Each amino acid has been assigned a hydropathic index on the basis of its hydrophobicity and charge characteristics (Kyte and Doolittle, 1982). These values are: isoleucine (+4.5); valine (+4.2); leucine (+3.8); phenylalanine (+2.8); cysteine/cystine (+2.5); methionine (+1.9); alanine (+1.8); glycine (−0.4); threonine (−0.7); serine (−0.8); tryptophan (−0.9); tyrosine (−1.3); proline (−1.6); histidine (−3.2); glutamate (−3.5); glutamine (−3.5); aspartate (−3.5); asparagine (−3.5); lysine (−3.9); and arginine (−4.5).

[0075] It is known in the art that certain amino acids may be substituted by other amino acids having a similar hydropathic index or score and still result in a protein with similar biological activity, i.e. still obtain a biological functionally equivalent protein. In making such changes, the substitution of amino acids whose hydropathic indices are within ±2 is preferred, those within ±1 are particularly preferred, and those within ±0.5 are even more particularly preferred. It is also understood in the art that the substitution of like amino acids can be made effectively on the basis of hydrophilicity. U.S. Pat. No. 4,554,101 (specifically incorporated herein by reference in its entirety), states that the greatest local average hydrophilicity of a protein, as governed by the hydrophilicity of its adjacent amino acids, correlates with a biological property of the protein.

[0076] As detailed in U.S. Pat. No. 4,554,101, the following hydrophilicity values have been assigned to amino acid residues: arginine (+3.0); lysine (+3.0); aspartate (+3.0±1); glutamate (+3.0±1); serine (+0.3); asparagine (+0.2); glutamine (+0.2); glycine (0); threonine (−0.4); proline (−0.5±1); alanine (−0.5); histidine (−0.5); cysteine (−1.0); methionine (−1.3); valine (−1.5); leucine (−1.8); isoleucine (−1.8); tyrosine (−2.3); phenylalanine (−2.5); tryptophan (−3.4). It is understood that an amino acid can be substituted for another having a similar hydrophilicity value and still obtain a biologically equivalent, and in particular, an immunologically equivalent protein. In such changes, the substitution of amino acids whose hydrophilicity values are within ±2 is preferred, those within ±1 are particularly preferred, and those within ±0.5 are even more particularly preferred.

[0077] As outlined above, amino acid substitutions are generally therefore based on the relative similarity of the amino acid side-chain substituents, for example, their hydrophobicity, hydrophilicity, charge, size, and the like. Exemplary substitutions that take various of the foregoing characteristics into consideration are well known to those of skill in the art and include: arginine and lysine; glutamate and aspartate; serine and threonine; glutamine and asparagine; and valine, leucine and isoleucine.

[0078] In addition, any polynucleotide may be further modified to increase stability in vivo. Possible modifications include, but are not limited to, the addition of flanking sequences at the 5′ and/or 3′ ends; the use of phosphorothioate or 2′ O-methyl rather than phosphodiesterase linkages in the backbone; and/or the inclusion of nontraditional bases such as inosine, queosine and wybutosine, as well as acetyl-methyl-, thio- and other modified forms of adenine, cytidine, guanine, thymine and uridine.

[0079] Amino acid substitutions may further be made on the basis of similarity in polarity, charge, solubility, hydrophobicity, hydrophilicity and/or the amphipathic nature of the residues. For example, negatively charged amino acids include aspartic acid and glutamic acid; positively charged amino acids include lysine and arginine; and amino acids with uncharged polar head groups having similar hydrophilicity values include leucine, isoleucine and valine; glycine and alanine; asparagine and glutamine; and serine, threonine, phenylalanine and tyrosine. Other groups of amino acids that may represent conservative changes include: (1) ala, pro, gly, glu, asp, gin, asn, ser, thr; (2) cys, ser, tyr, thr; (3) val, ile, leu, met, ala, phe; (4) lys, arg, his; and (5) phe, tyr, trp, his. A variant may also, or alternatively, contain nonconservative changes. In a preferred embodiment, variant polypeptides differ from a native sequence by substitution, deletion or addition of five amino acids or fewer. Variants may also (or alternatively) be modified by, for example, the deletion or addition of amino acids that have minimal influence on the immunogenicity, secondary structure and hydropathic nature of the polypeptide.

[0080] As noted above, polypeptides may comprise a signal (or leader) sequence at the N-terminal end of the protein, which co-translationally or post-translationally directs transfer of the protein. The polypeptide may also be conjugated to a linker or other sequence for ease of synthesis, purification or identification of the polypeptide (e.g., poly-His), or to enhance binding of the polypeptide to a solid support. For example, a polypeptide may be conjugated to an immunoglobulin Fc region.

[0081] When comparing polypeptide sequences, two sequences are said to be “identical” if the sequence of amino acids in the two sequences is the same when aligned for maximum correspondence, as described below. Comparisons between two sequences are typically performed by comparing the sequences over a comparison window to identify and compare local regions of sequence similarity. A “comparison window” as used herein, refers to a segment of at least about 20 contiguous positions, usually 30 to about 75, 40 to about 50, in which a sequence may be compared to a reference sequence of the same number of contiguous positions after the two sequences are optimally aligned.

[0082] Optimal alignment of sequences for comparison may be conducted using the Megalign program in the Lasergene suite of bioinformatics software (DNASTAR, Inc., Madison, Wis.), using default parameters. This program embodies several alignment schemes described in the following references: Dayhoff, M. O. (1978) A model of evolutionary change in proteins—Matrices for detecting distant relationships. In Dayhoff, M. O. (ed.) Atlas of Protein Sequence and Structure, National Biomedical Research Foundation, Washington D.C. Vol. 5, Suppl. 3, pp. 345-358; Hein J. (1990) Unified Approach to Alignment and Phylogenes pp. 626-645 Methods in Enzymology vol. 183, Academic Press, Inc., San Diego, Calif.; Higgins, D. G. and Sharp, P. M. (1989) CABIOS 5:151-153; Myers, E. W. and Muller W. (1988) CABIOS 4:11-17; Robinson, E. D. (1971) Comb. Theor 11:105; Saitou, N. Nei, M. (1987) Mol. Biol. Evol. 4:406-425; Sneath, P. H. A. and Sokal, R. R. (1973) Numerical Taxonomy—the Principles and Practice of Numerical Taxonomy, Freeman Press, San Francisco, Calif.; Wilbur, W. J. and Lipman, D. J. (1983) Proc. Natl. Acad., Sci. USA 80:726-730.

[0083] Alternatively, optimal alignment of sequences for comparison may be conducted by the local identity algorithm of Smith and Waterman (1981) Add. APL. Math 2:482, by the identity alignment algorithm of Needleman and Wunsch (1970) J. Mol. Biol. 48:443, by the search for similarity methods of Pearson and Lipman (1988) Proc. Natl. Acad. Sci. USA 85: 2444, by computerized implementations of these algorithms (GAP, BESTFIT, BLAST, FASTA, and TFASTA in the Wisconsin Genetics Software Package, Genetics Computer Group (GCG), 575 Science Dr., Madison, Wis.), or by inspection.

[0084] One preferred example of algorithms that are suitable for determining percent sequence identity and sequence similarity are the BLAST and BLAST 2.0 algorithms, which are described in Altschul et al. (1977) Nucl. Acids Res. 25:3389-3402 and Altschul et al. (1990) J. Mol. Biol. 215:403-410, respectively. BLAST and BLAST 2.0 can be used, for example with the parameters described herein, to determine percent sequence identity for the polynucleotides and polypeptides of the invention. Software for performing BLAST analyses is publicly available through the National Center for Biotechnology Information. For amino acid sequences, a scoring matrix can be used to calculate the cumulative score. Extension of the word hits in each direction are halted when: the cumulative alignment score falls off by the quantity X from its maximum achieved value; the cumulative score goes to zero or below, due to the accumulation of one or more negative-scoring residue alignments; or the end of either sequence is reached. The BLAST algorithm parameters W, T and X determine the sensitivity and speed of the alignment.

[0085] In one preferred approach, the “percentage of sequence identity” is determined by comparing two optimally aligned sequences over a window of comparison of at least 20 positions, wherein the portion of the polypeptide sequence in the comparison window may comprise additions or deletions (i.e., gaps) of 20 percent or less, usually 5 to 15 percent, or 10 to 12 percent, as compared to the reference sequences (which does not comprise additions or deletions) for optimal alignment of the two sequences. The percentage is calculated by determining the number of positions at which the identical amino acid residue occurs in both sequences to yield the number of matched positions, dividing the number of matched positions by the total number of positions in the reference sequence (i.e., the window size) and multiplying the results by 100 to yield the percentage of sequence identity.

[0086] Within other illustrative embodiments, a polypeptide may be a xenogeneic polypeptide that comprises an polypeptide having substantial sequence identity, as described above, to the human polypeptide (also termed autologous antigen) which served as a reference polypeptide, but which xenogeneic polypeptide is derived from a different, non-human species. One skilled in the art will recognize that “self” antigens are often poor stimulators of CD8+ and CD4+ T-lymphocyte responses, and therefore efficient immunotherapeutic strategies directed against tumor polypeptides require the development of methods to overcome immune tolerance to particular self tumor polypeptides. For example, humans immunized with prostase protein from a xenogeneic (non human) origin are capable of mounting an immune response against the counterpart human protein, e.g. the human prostase tumor protein present on human tumor cells. Accordingly, the present invention provides methods for purifying the xenogeneic form of the tumor proteins set forth herein, such as the polypeptide set forth in SEQ ID NOs:2235 and 2239, or those encoded by polynucleotide sequences set forth in SEQ ID NOs:1-2234, 2238 and 2240-2241.

[0087] Therefore, one aspect of the present invention provides xenogeneic variants of the polypeptide compositions described herein. Such xenogeneic variants generally encompassed by the present invention will typically exhibit at least about 70%, 75%, 80%, 85%, 90%, 91%, 92%, 93%, 94%, 95%, 96%, 97%, 98%, or 99% or more identity along their lengths, to a polypeptide sequences set forth herein.

[0088] More particularly, the invention is directed to mouse, rat, monkey, porcine and other non-human polypeptides which can be used as xenogeneic forms of human polypeptides set forth herein, to induce immune responses directed against tumor polypeptides of the invention.

[0089] Within other illustrative embodiments, a polypeptide may be a fusion polypeptide that comprises multiple polypeptides as described herein, or that comprises at least one polypeptide as described herein and an unrelated sequence, such as a known tumor protein. A fusion partner may, for example, assist in providing T helper epitopes (an immunological fusion partner), preferably T helper epitopes recognized by humans, or may assist in expressing the protein (an expression enhancer) at higher yields than the native recombinant protein. Certain preferred fusion partners are both immunological and expression enhancing fusion partners. Other fusion partners may be selected so as to increase the solubility of the polypeptide or to enable the polypeptide to be targeted to desired intracellular compartments. Still further fusion partners include affinity tags, which facilitate purification of the polypeptide.

[0090] Fusion polypeptides may generally be prepared using standard techniques, including chemical conjugation. Preferably, a fusion polypeptide is expressed as a recombinant polypeptide, allowing the production of increased levels, relative to a non-fused polypeptide, in an expression system. Briefly, DNA sequences encoding the polypeptide components may be assembled separately, and ligated into an appropriate expression vector. The 3′ end of the DNA sequence encoding one polypeptide component is ligated, with or without a peptide linker, to the 5′ end of a DNA sequence encoding the second polypeptide component so that the reading frames of the sequences are in phase. This permits translation into a single fusion polypeptide that retains the biological activity of both component polypeptides.

[0091] A peptide linker sequence may be employed to separate the first and second polypeptide components by a distance sufficient to ensure that each polypeptide folds into its secondary and tertiary structures. Such a peptide linker sequence is incorporated into the fusion polypeptide using standard techniques well known in the art. Suitable peptide linker sequences may be chosen based on the following factors: (1) their ability to adopt a flexible extended conformation; (2) their inability to adopt a secondary structure that could interact with functional epitopes on the first and second polypeptides; and (3) the lack of hydrophobic or charged residues that might react with the polypeptide functional epitopes. Preferred peptide linker sequences contain Gly, Asn and Ser residues. Other near neutral amino acids, such as Thr and Ala may also be used in the linker sequence. Amino acid sequences which may be usefully employed as linkers include those disclosed in Maratea et al., Gene 40:39-46, 1985; Murphy et al., Proc. Natl. Acad. Sci. USA 83:8258-8262, 1986; U.S. Pat. Nos. 4,935,233 and 4,751,180. The linker sequence may generally be from 1 to about 50 amino acids in length. Linker sequences are not required when the first and second polypeptides have non-essential N-terminal amino acid regions that can be used to separate the functional domains and prevent steric interference.

[0092] The ligated DNA sequences are operably linked to suitable transcriptional or translational regulatory elements. The regulatory elements responsible for expression of DNA are located only 5′ to the DNA sequence encoding the first polypeptides. Similarly, stop codons required to end translation and transcription termination signals are only present 3′ to the DNA sequence encoding the second polypeptide.

[0093] The fusion polypeptide can comprise a polypeptide as described herein together with an unrelated immunogenic protein, such as an immunogenic protein capable of eliciting a recall response. Examples of such proteins include tetanus, tuberculosis and hepatitis proteins (see, for example, Stoute et al. New Engl. J Med., 336:86-91,1997).

[0094] In one preferred embodiment, the immunological fusion partner is derived from a Mycobacterium sp., such as a Mycobacterium tuberculosis-derived Ra12 fragment. Ra12 compositions and methods for their use in enhancing the expression and/or immunogenicity of heterologous polynucleotide/polypeptide sequences is described in U.S. patent application Ser. No. 60/158,585, the disclosure of which is incorporated herein by reference in its entirety. Briefly, Ra12 refers to a polynucleotide region that is a subsequence of a Mycobacterium tuberculosis MTB32A nucleic acid. MTB32A is a serine protease of 32 KD molecular weight encoded by a gene in virulent and avirulent strains of M. tuberculosis. The nucleotide sequence and amino acid sequence of MTB32A have been described (for example, U.S. patent application Ser. No. 60/158,585; see also, Skeiky et al., Infection and Immun. (1999) 67:3998-4007, incorporated herein by reference). C-terminal fragments of the MTB32A coding sequence express at high levels and remain as a soluble polypeptides throughout the purification process. Moreover, Ra12 may enhance the immunogenicity of heterologous immunogenic polypeptides with which it is fused. One preferred Ra12 fusion polypeptide comprises a 14 KD C-terminal fragment corresponding to amino acid residues 192 to 323 of MTB32A. Other preferred Ra12 polynucleotides generally comprise at least about 15 consecutive nucleotides, at least about 30 nucleotides, at least about 60 nucleotides, at least about 100 nucleotides, at least about 200 nucleotides, or at least about 300 nucleotides that encode a portion of a Ra12 polypeptide. Ra12 polynucleotides may comprise a native sequence (i.e., an endogenous sequence that encodes a Ra12 polypeptide or a portion thereof) or may comprise a variant of such a sequence. Ra12 polynucleotide variants may contain one or more substitutions, additions, deletions and/or insertions such that the biological activity of the encoded fusion polypeptide is not substantially diminished, relative to a fusion polypeptide comprising a native Ra12 polypeptide. Variants preferably exhibit at least about 70% identity, more preferably at least about 80% identity and most preferably at least about 90% identity to a polynucleotide sequence that encodes a native Ra12 polypeptide or a portion thereof.

[0095] Within other preferred embodiments, an immunological fusion partner is derived from protein D, a surface protein of the gram-negative bacterium Haemophilus influenza B (WO 91/18926). Preferably, a protein D derivative comprises approximately the first third of the protein (e.g., the first N-terminal 100-110 amino acids), and a protein D derivative may be lipidated. Within certain preferred embodiments, the first 109 residues of a Lipoprotein D fusion partner is included on the N-terminus to provide the polypeptide with additional exogenous T-cell epitopes and to increase the expression level in E. coli (thus functioning as an expression enhancer). The lipid tail ensures optimal presentation of the antigen to antigen presenting cells. Other fusion partners include the non-structural protein from influenzae virus, NS1 (hemaglutinin). Typically, the N-terminal 81 amino acids are used, although different fragments that include T-helper epitopes may be used.

[0096] In another embodiment, the immunological fusion partner is the protein known as LYTA, or a portion thereof (preferably a C-terminal portion). LYTA is derived from Streptococcus pneumoniae, which synthesizes an N-acetyl-L-alanine amidase known as amidase LYTA (encoded by the LytA gene; Gene 43:265-292, 1986). LYTA is an autolysin that specifically degrades certain bonds in the peptidoglycan backbone. The C-terminal domain of the LYTA protein is responsible for the affinity to the choline or to some choline analogues such as DEAE. This property has been exploited for the development of E. coli C-LYTA expressing plasmids useful for expression of fusion proteins. Purification of hybrid proteins containing the C-LYTA fragment at the amino terminus has been described (see Biotechnology 10:795-798, 1992). Within a preferred embodiment, a repeat portion of LYTA may be incorporated into a fusion polypeptide. A repeat portion is found in the C-terminal region starting at residue 178. A particularly preferred repeat portion incorporates residues 188-305.

[0097] Yet another illustrative embodiment involves fusion polypeptides, and the polynucleotides encoding them, wherein the fusion partner comprises a targeting signal capable of directing a polypeptide to the endosomal/lysosomal compartment, as described in U.S. Pat. No. 5,633,234. An immunogenic polypeptide of the invention, when fused with this targeting signal, will associate more efficiently with MHC class II molecules and thereby provide enhanced in vivo stimulation of CD4⁺ T-cells specific for the polypeptide.

[0098] Polypeptides of the invention are prepared using any of a variety of well known synthetic and/or recombinant techniques, the latter of which are further described below. Polypeptides, portions and other variants generally less than about 150 amino acids can be generated by synthetic means, using techniques well known to those of ordinary skill in the art. In one illustrative example, such polypeptides are synthesized using any of the commercially available solid-phase techniques, such as the Merrifield solid-phase synthesis method, where amino acids are sequentially added to a growing amino acid chain. See Merrifield, J. Am. Chem. Soc. 85:2149-2146, 1963. Equipment for automated synthesis of polypeptides is commercially available from suppliers such as Perkin Elmer/Applied BioSystems Division (Foster City, Calif.), and may be operated according to the manufacturer's instructions.

[0099] In general, polypeptide compositions (including fusion polypeptides) of the invention are isolated. An “isolated” polypeptide is one that is removed from its original environment. For example, a naturally-occurring protein or polypeptide is isolated if it is separated from some or all of the coexisting materials in the natural system. Preferably, such polypeptides are also purified, e.g., are at least about 90% pure, more preferably at least about 95% pure and most preferably at least about 99% pure.

[0100] Polynucleotide Compositions

[0101] The present invention, in other aspects, provides polynucleotide compositions. The terms “DNA” and “polynucleotide” are used essentially interchangeably herein to refer to a DNA molecule that has been isolated free of total genomic DNA of a particular species. “Isolated,” as used herein, means that a polynucleotide is substantially away from other coding sequences, and that the DNA molecule does not contain large portions of unrelated coding DNA, such as large chromosomal fragments or other functional genes or polypeptide coding regions. Of course, this refers to the DNA molecule as originally isolated, and does not exclude genes or coding regions later added to the segment by the hand of man.

[0102] As will be understood by those skilled in the art, the polynucleotide compositions of this invention can include genomic sequences, extra-genomic and plasmid-encoded sequences and smaller engineered gene segments that express, or may be adapted to express, proteins, polypeptides, peptides and the like. Such segments may be naturally isolated, or modified synthetically by the hand of man.

[0103] As will be also recognized by the skilled artisan, polynucleotides of the invention may be single-stranded (coding or antisense) or double-stranded, and may be DNA (genomic, cDNA or synthetic) or RNA molecules. RNA molecules may include HnRNA molecules, which contain introns and correspond to a DNA molecule in a one-to-one manner, and mRNA molecules, which do not contain introns. Additional coding or non-coding sequences may, but need not, be present within a polynucleotide of the present invention, and a polynucleotide may, but need not, be linked to other molecules and/or support materials.

[0104] Polynucleotides may comprise a native sequence (i.e., an endogenous sequence that encodes a polypeptide/protein of the invention or a portion thereof or may comprise a sequence that encodes a variant or derivative, preferably and immunogenic variant or derivative, of such a sequence.

[0105] Therefore, according to another aspect of the present invention, polynucleotide compositions are provided that comprise some or all of a polynucleotide sequence set forth in any one of SEQ ID NOs:1-2234, 2238 and 2240-2241, complements of a polynucleotide sequence set forth in any one of SEQ ID NOs:1-2234, 2238 and 2240-2241, and degenerate variants of a polynucleotide sequence set forth in any one of SEQ ID NO:1-2234, 2238 and 2240-2241. In certain preferred embodiments, the polynucleotide sequences set forth herein encode immunogenic polypeptides, as described above.

[0106] In other related embodiments, the present invention provides polynucleotide variants having substantial identity to the sequences disclosed herein in SEQ ID NOs:1-2234, 2238 and 2240-2241, for example those comprising at least 70% sequence identity, preferably at least 75%, 80%, 85%, 90%, 95%, 96%, 97%, 98%, or 99% or higher, sequence identity compared to a polynucleotide sequence of this invention using the methods described herein, (e.g., BLAST analysis using standard parameters, as described below). One skilled in this art will recognize that these values can be appropriately adjusted to determine corresponding identity of proteins encoded by two nucleotide sequences by taking into account codon degeneracy, amino acid similarity, reading frame positioning and the like.

[0107] Typically, polynucleotide variants will contain one or more substitutions, additions, deletions and/or insertions, preferably such that the immunogenicity of the polypeptide encoded by the variant polynucleotide is not substantially diminished relative to a polypeptide encoded by a polynucleotide sequence specifically set forth herein). The term “variants” should also be understood to encompasses homologous genes of xenogeneic origin.

[0108] In additional embodiments, the present invention provides polynucleotide fragments comprising or consisting of various lengths of contiguous stretches of sequence identical to or complementary to one or more of the sequences disclosed herein. For example, polynucleotides are provided by this invention that comprise or consist of at least about 10, 15, 20, 30, 40, 50, 75, 100, 150, 200, 300, 400, 500 or 1000 or more contiguous nucleotides of one or more of the sequences disclosed herein as well as all intermediate lengths there between. It will be readily understood that “intermediate lengths”, in this context, means any length between the quoted values, such as 16, 17, 18, 19, etc.; 21, 22, 23, etc.; 30, 31, 32, etc.; 50, 51, 52, 53, etc.; 100, 101, 102, 103, etc.; 150, 151, 152, 153, etc.; including all integers through 200-500; 500-1,000, and the like. A polynucleotide sequence as described here may be extended at one or both ends by additional nucleotides not found in the native sequence. This additional sequence may consist of 1, 2, 3, 4, 5, 6, 7, 8, 9, 10, 11, 12, 13, 14, 15, 16, 17, 18, 19, or 20 nucleotides at either end of the disclosed sequence or at both ends of the disclosed sequence.

[0109] In another embodiment of the invention, polynucleotide compositions are provided that are capable of hybridizing under moderate to high stringency conditions to a polynucleotide sequence provided herein, or a fragment thereof, or a complementary sequence thereof. Hybridization techniques are well known in the art of molecular biology. For purposes of illustration, suitable moderately stringent conditions for testing the hybridization of a polynucleotide of this invention with other polynucleotides include prewashing in a solution of 5 ×SSC, 0.5% SDS, 1.0 mM EDTA (pH 8.0); hybridizing at 50° C.-60° C., 5 ×SSC, overnight; followed by washing twice at 65° C. for 20 minutes with each of 2×, 0.5× and 0.2×SSC containing 0.1% SDS. One skilled in the art will understand that the stringency of hybridization can be readily manipulated, such as by altering the salt content of the hybridization solution and/or the temperature at which the hybridization is performed. For example, in another embodiment, suitable highly stringent hybridization conditions include those described above, with the exception that the temperature of hybridization is increased, e.g., to 60-65° C. or 65-70° C.

[0110] In certain preferred embodiments, the polynucleotides described above, e.g., polynucleotide variants, fragments and hybridizing sequences, encode polypeptides that are immunologically cross-reactive with a polypeptide sequence specifically set forth herein. In other preferred embodiments, such polynucleotides encode polypeptides that have a level of immunogenic activity of at least about 50%, preferably at least about 70%, and more preferably at least about 90% of that for a polypeptide sequence specifically set forth herein.

[0111] The polynucleotides of the present invention, or fragments thereof, regardless of the length of the coding sequence itself, may be combined with other DNA sequences, such as promoters, polyadenylation signals, additional restriction enzyme sites, multiple cloning sites, other coding segments, and the like, such that their overall length may vary considerably. It is therefore contemplated that a nucleic acid fragment of almost any length may be employed, with the total length preferably being limited by the ease of preparation and use in the intended recombinant DNA protocol. For example, illustrative polynucleotide segments with total lengths of about 10,000, about 5000, about 3000, about 2,000, about 1,000, about 500, about 200, about 100, about 50 base pairs in length, and the like, (including all intermediate lengths) are contemplated to be useful in many implementations of this invention.

[0112] When comparing polynucleotide sequences, two sequences are said to be “identical” if the sequence of nucleotides in the two sequences is the same when aligned for maximum correspondence, as described below. Comparisons between two sequences are typically performed by comparing the sequences over a comparison window to identify and compare local regions of sequence similarity. A “comparison window” as used herein, refers to a segment of at least about 20 contiguous positions, usually 30 to about 75, 40 to about 50, in which a sequence may be compared to a reference sequence of the same number of contiguous positions after the two sequences are optimally aligned.

[0113] Optimal alignment of sequences for comparison may be conducted using the Megalign program in the Lasergene suite of bioinformatics software (DNASTAR, Inc., Madison, Wis.), using default parameters. This program embodies several alignment schemes described in the following references: Dayhoff, M.O. (1978) A model of evolutionary change in proteins—Matrices for detecting distant relationships. In Dayhoff, M. O. (ed.) Atlas of Protein Sequence and Structure, National Biomedical Research Foundation, Washington DC Vol. 5, Suppl. 3, pp. 345-358; Hein J. (1990) Unified Approach to Alignment and Phylogenes pp. 626-645 Methods in Enzymology vol. 183, Academic Press, Inc., San Diego, Calif.; Higgins, D. G. and Sharp, P. M. (1989) CABIOS 5:151-153; Myers, E. W. and Muller W. (1988) CABIOS 4:11-17; Robinson, E. D. (1971) Comb. Theor 11:105; Santou, N. Nes, M. (1987) Mol. Biol. Evol. 4:406-425; Sneath, P. H. A. and Sokal, R. R. (1973) Numerical Taxonomy—the Principles and Practice of Numerical Taxonomy, Freeman Press, San Francisco, Calif.; Wilbur, W. J. and Lipman, D. J. (1983) Proc. Natl. Acad., Sci. USA 80:726-730.

[0114] Alternatively, optimal alignment of sequences for comparison may be conducted by the local identity algorithm of Smith and Waterman (1981) Add. APL. Math 2:482, by the identity alignment algorithm of Needleman and Wunsch (1970) J. Mol. Biol. 48:443, by the search for similarity methods of Pearson and Lipman (1988) Proc. Natl. Acad. Sci. USA 85: 2444, by computerized implementations of these algorithms (GAP, BESTFIT, BLAST, FASTA, and TFASTA in the Wisconsin Genetics Software Package, Genetics Computer Group (GCG), 575 Science Dr., Madison, Wis.), or by inspection.

[0115] One preferred example of algorithms that are suitable for determining percent sequence identity and sequence similarity are the BLAST and BLAST 2.0 algorithms, which are described in Altschul et al. (1977) Nucl. Acids Res. 25:3389-3402 and Altschul et al. (1990) J. Mol. Biol. 215:403-410, respectively. BLAST and BLAST 2.0 can be used, for example with the parameters described herein, to determine percent sequence identity for the polynucleotides of the invention. Software for performing BLAST analyses is publicly available through the National Center for Biotechnology Information. In one illustrative example, cumulative scores can be calculated using, for nucleotide sequences, the parameters M (reward score for a pair of matching residues; always >0) and N (penalty score for mismatching residues; always <0). Extension of the word hits in each direction are halted when: the cumulative alignment score falls off by the quantity X from its maximum achieved value; the cumulative score goes to zero or below, due to the accumulation of one or more negative-scoring residue alignments; or the end of either sequence is reached. The BLAST algorithm parameters W, T and X determine the sensitivity and speed of the alignment. The BLASTN program (for nucleotide sequences) uses as defaults a wordlength (W) of 11, and expectation (E) of 10, and the BLOSUM62 scoring matrix (see Henikoff and Henikoff (1989) Proc. Natl. Acad. Sci. USA 89:10915) alignments, (B) of 50, expectation (E) of 10, M=5, N=-4 and a comparison of both strands.

[0116] Preferably, the “percentage of sequence identity” is determined by comparing two optimally aligned sequences over a window of comparison of at least 20 positions, wherein the portion of the polynucleotide sequence in the comparison window may comprise additions or deletions (i.e., gaps) of 20 percent or less, usually 5 to 15 percent, or 10 to 12 percent, as compared to the reference sequences (which does not comprise additions or deletions) for optimal alignment of the two sequences. The percentage is calculated by determining the number of positions at which the identical nucleic acid bases occurs in both sequences to yield the number of matched positions, dividing the number of matched positions by the total number of positions in the reference sequence (i.e., the window size) and multiplying the results by 100 to yield the percentage of sequence identity.

[0117] It will be appreciated by those of ordinary skill in the art that, as a result of the degeneracy of the genetic code, there are many nucleotide sequences that encode a polypeptide as described herein. Some of these polynucleotides bear minimal homology to the nucleotide sequence of any native gene. Nonetheless, polynucleotides that vary due to differences in codon usage are specifically contemplated by the present invention. Further, alleles of the genes comprising the polynucleotide sequences provided herein are within the scope of the present invention. Alleles are endogenous genes that are altered as a result of one or more mutations, such as deletions, additions and/or substitutions of nucleotides. The resulting mRNA and protein may, but need not, have an altered structure or function. Alleles may be identified using standard techniques (such as hybridization, amplification and/or database sequence comparison).

[0118] Therefore, in another embodiment of the invention, a mutagenesis approach, such as site-specific mutagenesis, is employed for the preparation of immunogenic variants and/or derivatives of the polypeptides described herein. By this approach, specific modifications in a polypeptide sequence can be made through mutagenesis of the underlying polynucleotides that encode them. These techniques provides a straightforward approach to prepare and test sequence variants, for example, incorporating one or more of the foregoing considerations, by introducing one or more nucleotide sequence changes into the polynucleotide.

[0119] Site-specific mutagenesis allows the production of mutants through the use of specific oligonucleotide sequences which encode the DNA sequence of the desired mutation, as well as a sufficient number of adjacent nucleotides, to provide a primer sequence of sufficient size and sequence complexity to form a stable duplex on both sides of the deletion junction being traversed. Mutations may be employed in a selected polynucleotide sequence to improve, alter, decrease, modify, or otherwise change the properties of the polynucleotide itself, and/or alter the properties, activity, composition, stability, or primary sequence of the encoded polypeptide.

[0120] In certain embodiments of the present invention, the inventors contemplate the mutagenesis of the disclosed polynucleotide sequences to alter one or more properties of the encoded polypeptide, such as the immunogenicity of a polypeptide vaccine. The techniques of site-specific mutagenesis are well-known in the art, and are widely used to create variants of both polypeptides and polynucleotides. For example, site-specific mutagenesis is often used to alter a specific portion of a DNA molecule. In such embodiments, a primer comprising typically about 14 to about 25 nucleotides or so in length is employed, with about 5 to about 10 residues on both sides of the junction of the sequence being altered.

[0121] As will be appreciated by those of skill in the art, site-specific mutagenesis techniques have often employed a phage vector that exists in both a single stranded and double stranded form. Typical vectors useful in site-directed mutagenesis include vectors such as the M13 phage. These phage are readily commercially-available and their use is generally well-known to those skilled in the art. Double-stranded plasmids are also routinely employed in site directed mutagenesis that eliminates the step of transferring the gene of interest from a plasmid to a phage.

[0122] In general, site-directed mutagenesis in accordance herewith is performed by first obtaining a single-stranded vector or melting apart of two strands of a double-stranded vector that includes within its sequence a DNA sequence that encodes the desired peptide. An oligonucleotide primer bearing the desired mutated sequence is prepared, generally synthetically. This primer is then annealed with the single-stranded vector, and subjected to DNA polymerizing enzymes such as E. coli polymerase I Klenow fragment, in order to complete the synthesis of the mutation-bearing strand. Thus, a heteroduplex is formed wherein one strand encodes the original non-mutated sequence and the second strand bears the desired mutation. This heteroduplex vector is then used to transform appropriate cells, such as E. coli cells, and clones are selected which include recombinant vectors bearing the mutated sequence arrangement.

[0123] The preparation of sequence variants of the selected peptide-encoding DNA segments using site-directed mutagenesis provides a means of producing potentially useful species and is not meant to be limiting as there are other ways in which sequence variants of peptides and the DNA sequences encoding them may be obtained. For example, recombinant vectors encoding the desired peptide sequence may be treated with mutagenic agents, such as hydroxylamine, to obtain sequence variants. Specific details regarding these methods and protocols are found in the teachings of Maloy et al., 1994; Segal, 1976; Prokop and Bajpai, 1991; Kuby, 1994; and Maniatis et al., 1982, each incorporated herein by reference, for that purpose.

[0124] As used herein, the term “oligonucleotide directed mutagenesis procedure” refers to template-dependent processes and vector-mediated propagation which result in an increase in the concentration of a specific nucleic acid molecule relative to its initial concentration, or in an increase in the concentration of a detectable signal, such as amplification. As used herein, the term “oligonucleotide directed mutagenesis procedure” is intended to refer to a process that involves the template-dependent extension of a primer molecule. The term template dependent process refers to nucleic acid synthesis of an RNA or a DNA molecule wherein the sequence of the newly synthesized strand of nucleic acid is dictated by the well-known rules of complementary base pairing (see, for example, Watson, 1987). Typically, vector mediated methodologies involve the introduction of the nucleic acid fragment into a DNA or RNA vector, the clonal amplification of the vector, and the recovery of the amplified nucleic acid fragment. Examples of such methodologies are provided by U.S. Pat. No. 4,237,224, specifically incorporated herein by reference in its entirety.

[0125] In another approach for the production of polypeptide variants of the present invention, recursive sequence recombination, as described in U.S. Pat. No. 5,837,458, may be employed. In this approach, iterative cycles of recombination and screening or selection are performed to “evolve” individual polynucleotide variants of the invention having, for example, enhanced immunogenic activity.

[0126] In other embodiments of the present invention, the polynucleotide sequences provided herein can be advantageously used as probes or primers for nucleic acid hybridization. As such, it is contemplated that nucleic acid segments that comprise or consist of a sequence region of at least about a 15 nucleotide long contiguous sequence that has the same sequence as, or is complementary to, a 15 nucleotide long contiguous sequence disclosed herein will find particular utility. Longer contiguous identical or complementary sequences, e.g., those of about 20, 30, 40, 50, 100, 200, 500, 1000 (including all intermediate lengths) and even up to full length sequences will also be of use in certain embodiments.

[0127] The ability of such nucleic acid probes to specifically hybridize to a sequence of interest will enable them to be of use in detecting the presence of complementary sequences in a given sample. However, other uses are also envisioned, such as the use of the sequence information for the preparation of mutant species primers, or primers for use in preparing other genetic constructions.

[0128] Polynucleotide molecules having sequence regions consisting of contiguous nucleotide stretches of 10-14, 15-20, 30, 50, or even of 100-200 nucleotides or so (including intermediate lengths as well), identical or complementary to a polynucleotide sequence disclosed herein, are particularly contemplated as hybridization probes for use in, e.g., Southern and Northern blotting. This would allow a gene product, or fragment thereof, to be analyzed, both in diverse cell types and also in various bacterial cells. The total size of fragment, as well as the size of the complementary stretch(es), will ultimately depend on the intended use or application of the particular nucleic acid segment. Smaller fragments will generally find use in hybridization embodiments, wherein the length of the contiguous complementary region may be varied, such as between about 15 and about 100 nucleotides, but larger contiguous complementarity stretches may be used, according to the length complementary sequences one wishes to detect.

[0129] The use of a hybridization probe of about 15-25 nucleotides in length allows the formation of a duplex molecule that is both stable and selective. Molecules having contiguous complementary sequences over stretches greater than 15 bases in length are generally preferred, though, in order to increase stability and selectivity of the hybrid, and thereby improve the quality and degree of specific hybrid molecules obtained. One will generally prefer to design nucleic acid molecules having gene-complementary stretches of 15 to 25 contiguous nucleotides, or even longer where desired.

[0130] Hybridization probes may be selected from any portion of any of the sequences disclosed herein. All that is required is to review the sequences set forth herein, or to any continuous portion of the sequences, from about 15-25 nucleotides in length up to and including the full length sequence, that one wishes to utilize as a probe or primer. The choice of probe and primer sequences may be governed by various factors. For example, one may wish to employ primers from towards the termini of the total sequence.

[0131] Small polynucleotide segments or fragments may be readily prepared by, for example, directly synthesizing the fragment by chemical means, as is commonly practiced using an automated oligonucleotide synthesizer. Also, fragments may be obtained by application of nucleic acid reproduction technology, such as the PCR™ technology of U. S. Pat. No. 4,683,202 (incorporated herein by reference), by introducing selected sequences into recombinant vectors for recombinant production, and by other recombinant DNA techniques generally known to those of skill in the art of molecular biology.

[0132] The nucleotide sequences of the invention may be used for their ability to selectively form duplex molecules with complementary stretches of the entire gene or gene fragments of interest. Depending on the application envisioned, one will typically desire to employ varying conditions of hybridization to achieve varying degrees of selectivity of probe towards target sequence. For applications requiring high selectivity, one will typically desire to employ relatively stringent conditions to form the hybrids, e.g., one will select relatively low salt and/or high temperature conditions, such as provided by a salt concentration of from about 0.02 M to about 0.15 M salt at temperatures of from about 50° C. to about 70° C. Such selective conditions tolerate little, if any, mismatch between the probe and the template or target strand, and would be particularly suitable for isolating related sequences.

[0133] Of course, for some applications, for example, where one desires to prepare mutants employing a mutant primer strand hybridized to an underlying template, less stringent (reduced stringency) hybridization conditions will typically be needed in order to allow formation of the heteroduplex. In these circumstances, one may desire to employ salt conditions such as those of from about 0.15 M to about 0.9 M salt, at temperatures ranging from about 20° C. to about 55° C. Cross-hybridizing species can thereby be readily identified as positively hybridizing signals with respect to control hybridizations. In any case, it is generally appreciated that conditions can be rendered more stringent by the addition of increasing amounts of formamide, which serves to destabilize the hybrid duplex in the same manner as increased temperature. Thus, hybridization conditions can be readily manipulated, and thus will generally be a method of choice depending on the desired results.

[0134] According to another embodiment of the present invention, polynucleotide compositions comprising antisense oligonucleotides are provided. Antisense oligonucleotides have been demonstrated to be effective and targeted inhibitors of protein synthesis, and, consequently, provide a therapeutic approach by which a disease can be treated by inhibiting the synthesis of proteins that contribute to the disease. The efficacy of antisense oligonucleotides for inhibiting protein synthesis is well established. For example, the synthesis of polygalactauronase and the muscarine type 2 acetylcholine receptor are inhibited by antisense oligonucleotides directed to their respective mRNA sequences (U.S. Pat. Nos. 5,739,119 and 5,759,829). Further, examples of antisense inhibition have been demonstrated with the nuclear protein cyclin, the multiple drug resistance gene (MDG1), ICAM-1, E-selectin, STK-1, striatal GABA_{A} receptor and human EGF (Jaskulski et al., Science. Jun. 10, 1988;240(4858):1544-6; Vasanthakumar and Ahmed, Cancer Commun. 1989;1(4):225-32; Peris et al., Brain Res Mol Brain Res. Jun. 15, 1998;57(2):310-20; U.S. Pat. Nos. 5,801,154; 5,789,573; 5,718,709 and 5,610,288). Antisense constructs have also been described that inhibit and can be used to treat a variety of abnormal cellular proliferations, e.g. cancer (U.S. Pat. Nos. 5,747,470; 5,591,317 and 5,783,683).

[0135] Therefore, in certain embodiments, the present invention provides oligonucleotide sequences that comprise all, or a portion of, any sequence that is capable of specifically binding to polynucleotide sequence described herein, or a complement thereof. In one embodiment, the antisense oligonucleotides comprise DNA or derivatives thereof. In another embodiment, the oligonucleotides comprise RNA or derivatives thereof. In a third embodiment, the oligonucleotides are modified DNAs comprising a phosphorothioated modified backbone. In a fourth embodiment, the oligonucleotide sequences comprise peptide nucleic acids or derivatives thereof. In each case, preferred compositions comprise a sequence region that is complementary, and more preferably substantially-complementary, and even more preferably, completely complementary to one or more portions of polynucleotides disclosed herein. Selection of antisense compositions specific for a given gene sequence is based upon analysis of the chosen target sequence and determination of secondary structure, Tₘ, binding energy, and relative stability. Antisense compositions may be selected based upon their relative inability to form dimers, hairpins, or other secondary structures that would reduce or prohibit specific binding to the target mRNA in a host cell. Highly preferred target regions of the mRNA, are those which are at or near the AUG translation initiation codon, and those sequences which are substantially complementary to 5′ regions of the mRNA. These secondary structure analyses and target site selection considerations can be performed, for example, using v.4 of the OLIGO primer analysis software and/or the BLASTN 2.0.5 algorithm software (Altschul et al., Nucleic Acids Res. 1997, 25(17):3389-402).

[0136] The use of an antisense delivery method employing a short peptide vector, termed MPG (27 residues), is also contemplated. The MPG peptide contains a hydrophobic domain derived from the fusion sequence of HIV gp41 and a hydrophilic domain from the nuclear localization sequence of SV40 T-antigen (Morris et al., Nucleic Acids Res. Jul. 15, 1997;25(14):2730-6). It has been demonstrated that several molecules of the MPG peptide coat the antisense oligonucleotides and can be delivered into cultured mammalian cells in less than 1 hour with relatively high efficiency (90%). Further, the interaction with MPG strongly increases both the stability of the oligonucleotide to nuclease and the ability to cross the plasma membrane.

[0137] According to another embodiment of the invention, the polynucleotide compositions described herein are used in the design and preparation of ribozyme molecules for inhibiting expression of the tumor polypeptides and proteins of the present invention in tumor cells. Ribozymes are RNA-protein complexes that cleave nucleic acids in a site-specific fashion. Ribozymes have specific catalytic domains that possess endonuclease activity (Kim and Cech, Proc Natl Acad Sci U S A. Decembe 1987;84(24):8788-92; Forster and Symons, Cell. Apr. 24, 1987;49(2):21 1-20). For example, a large number of ribozymes accelerate phosphoester transfer reactions with a high degree of specificity, often cleaving only one of several phosphoesters in an oligonucleotide substrate (Cech et al., Cell. December 1981;27(3 Pt 2):487-96; Michel and Westhof, J Mol Biol. 1990 Dec 5;216(3):585-610; Reinhold-Hurek and Shub, Nature. May 14, 1992;357(6374):173-6). This specificity has been attributed to the requirement that the substrate bind via specific base-pairing interactions to the internal guide sequence (“IGS”) of the ribozyme prior to chemical reaction.

[0138] Six basic varieties of naturally-occurring enzymatic RNAs are known presently. Each can catalyze the hydrolysis of RNA phosphodiester bonds in trans (and thus can cleave other RNA molecules) under physiological conditions. In general, enzymatic nucleic acids act by first binding to a target RNA. Such binding occurs through the target binding portion of a enzymatic nucleic acid which is held in close proximity to an enzymatic portion of the molecule that acts to cleave the target RNA. Thus, the enzymatic nucleic acid first recognizes and then binds a target RNA through complementary base-pairing, and once bound to the correct site, acts enzymatically to cut the target RNA. Strategic cleavage of such a target RNA will destroy its ability to direct synthesis of an encoded protein. After an enzymatic nucleic acid has bound and cleaved its RNA target, it is released from that RNA to search for another target and can repeatedly bind and cleave new targets.

[0139] The enzymatic nature of a ribozyme is advantageous over many technologies, such as antisense technology (where a nucleic acid molecule simply binds to a nucleic acid target to block its translation) since the concentration of ribozyme necessary to affect a therapeutic treatment is lower than that of an antisense oligonucleotide. This advantage reflects the ability of the ribozyme to act enzymatically. Thus, a single ribozyme molecule is able to cleave many molecules of target RNA. In addition, the ribozyme is a highly specific inhibitor, with the specificity of inhibition depending not only on the base pairing mechanism of binding to the target RNA, but also on the mechanism of target RNA cleavage. Single mismatches, or base-substitutions, near the site of cleavage can completely eliminate catalytic activity of a ribozyme. Similar mismatches in antisense molecules do not prevent their action (Woolf et al., Proc Natl Acad Sci U S A. Aug. 15, 1992;89(16):7305-9). Thus, the specificity of action of a ribozyme is greater than that of an antisense oligonucleotide binding the same RNA site.

[0140] The enzymatic nucleic acid molecule may be formed in a hammerhead, hairpin, a hepatitis δ virus, group I intron or RNaseP RNA (in association with an RNA guide sequence) or Neurospora VS RNA motif. Examples of hammerhead motifs are described by Rossi et al. Nucleic Acids Res. Sep. 11, 1992;20(17):4559-65. Examples of hairpin motifs are described by Hampel et al. (Eur. Pat. Appl. Publ. No. EP 0360257), Hampel and Tritz, Biochemistry Jun. 13, 1989;28(12):4929-33; Hampel et al, Nucleic Acids Res. Jan. 25, 1990;18(2):299-304 and U.S. Pat. No. 5,631,359. An example of the hepatitis δ virus motif is described by Perrotta and Been, Biochemistry. Dec. 1, 1992 ;31(47):11843-52; an example of the RNaseP motif is described by Guerrier-Takada et al., Cell. 1983 December;35(3 Pt 2):849-57; Neurospora VS RNA ribozyme motif is described by Collins (Saville and Collins, Cell. 1990 May 18;61(4):685-96; Saville and Collins, Proc Natl Acad Sci U S A. Oct. 1, 1991;88(19):8826-30; Collins and Olive, Biochemistry. Mar. 23, 1993;32(11):2795-9); and an example of the Group I intron is described in (U.S. Pat. No. 4,987,071). All that is important in an enzymatic nucleic acid molecule of this invention is that it has a specific substrate binding site which is complementary to one or more of the target gene RNA regions, and that it have nucleotide sequences within or surrounding that substrate binding site which impart an RNA cleaving activity to the molecule. Thus the ribozyme constructs need not be limited to specific motifs mentioned herein.

[0141] Ribozymes may be designed as described in Int. Pat. Appl. Publ. No. WO 93/23569 and Int. Pat. Appl. Publ. No. WO 94/02595, each specifically incorporated herein by reference) and synthesized to be tested in vitro and in vivo, as described. Such ribozymes can also be optimized for delivery. While specific examples are provided, those in the art will recognize that equivalent RNA targets in other species can be utilized when necessary.

[0142] Ribozyme activity can be optimized by altering the length of the ribozyme binding arms, or chemically synthesizing ribozymes with modifications that prevent their degradation by serum ribonucleases (see e.g., Int. Pat. Appl. Publ. No. WO 92/07065; Int. Pat. Appl. Publ. No. WO 93/15187; Int. Pat. Appl. Publ. No. WO 91/03162; Eur. Pat. Appl. Publ. No. 92110298.4; U.S. Pat. No. 5,334,711; and Int. Pat. Appl. Publ. No. WO 94/13688, which describe various chemical modifications that can be made to the sugar moieties of enzymatic RNA molecules), modifications which enhance their efficacy in cells, and removal of stem II bases to shorten RNA synthesis times and reduce chemical requirements.

[0143] Sullivan et al. (Int. Pat. Appl. Publ. No. WO 94/02595) describes the general methods for delivery of enzymatic RNA molecules. Ribozymes may be administered to cells by a variety of methods known to those familiar to the art, including, but not restricted to, encapsulation in liposomes, by iontophoresis, or by incorporation into other vehicles, such as hydrogels, cyclodextrins, biodegradable nanocapsules, and bioadhesive microspheres. For some indications, ribozymes may be directly delivered ex vivo to cells or tissues with or without the aforementioned vehicles. Alternatively, the RNA/vehicle combination may be locally delivered by direct inhalation, by direct injection or by use of a catheter, infusion pump or stent. Other routes of delivery include, but are not limited to, intravascular, intramuscular, subcutaneous or joint injection, aerosol inhalation, oral (tablet or pill form), topical, systemic, ocular, intraperitoneal and/or intrathecal delivery. More detailed descriptions of ribozyme delivery and administration are provided in Int. Pat. Appl. Publ. No. WO 94/02595 and Int. Pat. Appl. Publ. No. WO 93/23569, each specifically incorporated herein by reference.

[0144] Another means of accumulating high concentrations of a ribozyme(s) within cells is to incorporate the ribozyme-encoding sequences into a DNA expression vector. Transcription of the ribozyme sequences are driven from a promoter for eukaryotic RNA polymerase I (pol I), RNA polymerase II (pol III), or RNA polymerase III (pol III). Transcripts from pol II or pol III promoters will be expressed at high levels in all cells; the levels of a given pol II promoter in a given cell type will depend on the nature of the gene regulatory sequences (enhancers, silencers, etc.) present nearby. Prokaryotic RNA polymerase promoters may also be used, providing that the prokaryotic RNA polymerase enzyme is expressed in the appropriate cells Ribozymes expressed from such promoters have been shown to function in mammalian cells. Such transcription units can be incorporated into a variety of vectors for introduction into mammalian cells, including but not restricted to, plasmid DNA vectors, viral DNA vectors (such as adenovirus or adeno-associated vectors), or viral RNA vectors (such as retroviral, semliki forest virus, sindbis virus vectors).

[0145] In another embodiment of the invention, peptide nucleic acids (PNAs) compositions are provided. PNA is a DNA mimic in which the nucleobases are attached to a pseudopeptide backbone (Good and Nielsen, Antisense Nucleic Acid Drug Dev. 1997 7(4) 431-37). PNA is able to be utilized in a number methods that traditionally have used RNA or DNA. Often PNA sequences perform better in techniques than the corresponding RNA or DNA sequences and have utilities that are not inherent to RNA or DNA. A review of PNA including methods of making, characteristics of, and methods of using, is provided by Corey (Trends Biotechnol Jun. 15, 1997(6):224-9). As such, in certain embodiments, one may prepare PNA sequences that are complementary to one or more portions of the ACE mRNA sequence, and such PNA compositions may be used to regulate, alter, decrease, or reduce the translation of ACE-specific mRNA, and thereby alter the level of ACE activity in a host cell to which such PNA compositions have been administered.

[0146] PNAs have 2-aminoethyl-glycine linkages replacing the normal phosphodiester backbone of DNA (Nielsen et al., Science Dec. 6, 1991;254(5037):1497-500; Hanvey et al., Science. Nov. 27, 1992;258(5087):1481-5; Hyrup and Nielsen, Bioorg Med Chem. Jan. 4, 1996(1):5-23). This chemistry has three important consequences: firstly, in contrast to DNA or phosphorothioate oligonucleotides, PNAs are neutral molecules; secondly, PNAs are achiral, which avoids the need to develop a stereoselective synthesis; and thirdly, PNA synthesis uses standard Boc or Fmoc protocols for solid-phase peptide synthesis, although other methods, including a modified Merrifield method, have been used.

[0147] PNA monomers or ready-made oligomers are commercially available from PerSeptive Biosystems (Framingham, Mass.). PNA syntheses by either Boc or Fmoc protocols are straightforward using manual or automated protocols (Norton et al., Bioorg Med Chem. Apr. 3, 1995(4):437-45). The manual protocol lends itself to the production of chemically modified PNAs or the simultaneous synthesis of families of closely related PNAs.

[0148] As with peptide synthesis, the success of a particular PNA synthesis will depend on the properties of the chosen sequence. For example, while in theory PNAs can incorporate any combination of nucleotide bases, the presence of adjacent purines can lead to deletions of one or more residues in the product. In expectation of this difficulty, it is suggested that, in producing PNAs with adjacent purines, one should repeat the coupling of residues likely to be added inefficiently. This should be followed by the purification of PNAs by reverse-phase high-pressure liquid chromatography, providing yields and purity of product similar to those observed during the synthesis of peptides.

[0149] Modifications of PNAs for a given application may be accomplished by coupling amino acids during solid-phase synthesis or by attaching compounds that contain a carboxylic acid group to the exposed N-terminal amine. Alternatively, PNAs can be modified after synthesis by coupling to an introduced lysine or cysteine. The ease with which PNAs can be modified facilitates optimization for better solubility or for specific functional requirements. Once synthesized, the identity of PNAs and their derivatives can be confirmed by mass spectrometry. Several studies have made and utilized modifications of PNAs (for example, Norton et al., Bioorg Med Chem. Apr. 3, 1995(4):437-45; Petersen et al., J Pept Sci. May-Jun. 1, 1995(3):175-83; Orum et al., Biotechniques. Sep. 19, 1995(3):472-80; Footer et al., Biochemistry. Aug. 20, 1996;35(33):10673-9; Griffith et al., Nucleic Acids Res. Aug. 11, 1995;23(15):3003-8; Pardridge et al., Proc Natl Acad Sci U S A. Jun. 6, 1995;92(12):5592-6; Boffa et al., Proc Natl Acad Sci U S A. Mar. 14, 1995;92(6):1901-5; Gambacorti-Passerini et al., Blood. Aug. 15, 1996;88(4):1411-7; Armitage et al., Proc Natl Acad Sci U S A. Nov. 11, 1997;94(23):12320-5; Seeger et al., Biotechniques. Sep. 23, 1997(3):512-7). U.S. Pat. No. 5,700,922 discusses PNA-DNA-PNA chimeric molecules and their uses in diagnostics, modulating protein in organisms, and treatment of conditions susceptible to therapeutics.

[0150] Methods of characterizing the antisense binding properties of PNAs are discussed in Rose (Anal Chem. Dec. 15, 1993;65(24):3545-9) and Jensen et al. (Biochemistry. Apr. 22, 1997;36(16):5072-7). Rose uses capillary gel electrophoresis to determine binding of PNAs to their complementary oligonucleotide, measuring the relative binding kinetics and stoichiometry. Similar types of measurements were made by Jensen et al. using BlAcore™ technology.

[0151] Other applications of PNAs that have been described and will be apparent to the skilled artisan include use in DNA strand invasion, antisense inhibition, mutational analysis, enhancers of transcription, nucleic acid purification, isolation of transcriptionally active genes, blocking of transcription factor binding, genome cleavage, biosensors, in situ hybridization, and the like.

[0152] Polynucleotide Identification, Characterization and Expression

[0153] Polynucleotides compositions of the present invention may be identified, prepared and/or manipulated using any of a variety of well established techniques (see generally, Sambrook et al., Molecular Cloning: A Laboratory Manual, Cold Spring Harbor Laboratories, Cold Spring Harbor, N.Y., 1989, and other like references). For example, a polynucleotide may be identified, as described in more detail below, by screening a microarray of cDNAs for tumor-associated expression (i.e., expression that is at least two fold greater in a tumor than in normal tissue, as determined using a representative assay provided herein). Such screens may be performed, for example, using the microarray technology of Affymetrix, Inc. (Santa Clara, Calif.) according to the manufacturer's instructions (and essentially as described by Schena et al., Proc. Natl. Acad. Sci. USA 93:10614-10619, 1996 and Heller et al., Proc. Natl. Acad. Sci. USA 94:2150-2155, 1997). Alternatively, polynucleotides may be amplified from cDNA prepared from cells expressing the proteins described herein, such as tumor cells.

[0154] Many template dependent processes are available to amplify a target sequences of interest present in a sample. One of the best known amplification methods is the polymerase chain reaction (PCR™) which is described in detail in U.S. Pat. Nos. 4,683,195, 4,683,202 and 4,800,159, each of which is incorporated herein by reference in its entirety. Briefly, in PCR™, two primer sequences are prepared which are complementary to regions on opposite complementary strands of the target sequence. An excess of deoxynucleoside triphosphates is added to a reaction mixture along with a DNA polymerase (e.g., Taq polymerase). If the target sequence is present in a sample, the primers will bind to the target and the polymerase will cause the primers to be extended along the target sequence by adding on nucleotides. By raising and lowering the temperature of the reaction mixture, the extended primers will dissociate from the target to form reaction products, excess primers will bind to the target and to the reaction product and the process is repeated. Preferably reverse transcription and PCR™ amplification procedure may be performed in order to quantify the amount of mRNA amplified. Polymerase chain reaction methodologies are well known in the art.

[0155] Any of a number of other template dependent processes, many of which are variations of the PCR™ amplification technique, are readily known and available in the art. Illustratively, some such methods include the ligase chain reaction (referred to as LCR), described, for example, in Eur. Pat. Appl. Publ. No. 320,308 and U.S. Pat. No. 4,883,750; Qbeta Replicase, described in PCT Intl. Pat. Appl. Publ. No. PCT/US87/00880; Strand Displacement Amplification (SDA) and Repair Chain Reaction (RCR). Still other amplification methods are described in Great Britain Pat. Appl. No. 2 202 328, and in PCT Intl. Pat. Appl. Publ. No. PCT/US89101025. Other nucleic acid amplification procedures include transcription-based amplification systems (TAS) (PCT Intl. Pat. Appl. Publ. No. WO 88/10315), including nucleic acid sequence based amplification (NASBA) and 3SR. Eur. Pat. Appl. Publ. No. 329,822 describes a nucleic acid amplification process involving cyclically synthesizing single-stranded RNA (“ssRNA”), ssDNA, and double-stranded DNA (dsDNA). PCT Intl. Pat. Appl. Publ. No. WO 89/06700 describes a nucleic acid sequence amplification scheme based on the hybridization of a promoter/primer sequence to a target single-stranded DNA (“ssDNA”) followed by transcription of many RNA copies of the sequence. Other amplification methods such as “RACE” (Frohman, 1990), and “one-sided PCR” (Ohara, 1989) are also well-known to those of skill in the art.

[0156] An amplified portion of a polynucleotide of the present invention may be used to isolate a full length gene from a suitable library (e.g., a tumor cDNA library) using well known techniques. Within such techniques, a library (cDNA or genomic) is screened using one or more polynucleotide probes or primers suitable for amplification. Preferably, a library is size-selected to include larger molecules. Random primed libraries may also be preferred for identifying 5′ and upstream regions of genes. Genomic libraries are preferred for obtaining introns and extending 5′ sequences.

[0157] For hybridization techniques, a partial sequence may be labeled (e.g., by nick-translation or end-labeling with ³²P) using well-known techniques. A bacterial or bacteriophage library is then generally screened by hybridizing filters containing denatured bacterial colonies (or lawns containing phage plaques) with the labeled probe (see Sambrook et al., Molecular Cloning: A Laboratory Manual, Cold Spring Harbor Laboratories, Cold Spring Harbor, N.Y., 1989). Hybridizing colonies or plaques are selected and expanded, and the DNA is isolated for further analysis. cDNA clones may be analyzed to determine the amount of additional sequence by, for example, PCR using a primer from the partial sequence and a primer from the vector. Restriction maps and partial sequences may be generated to identify one or more overlapping clones. The complete sequence may then be determined using standard techniques, which may involve generating a series of deletion clones. The resulting overlapping sequences can then assembled into a single contiguous sequence. A full length cDNA molecule can be generated by ligating suitable fragments, using well known techniques.

[0158] Alternatively, amplification techniques, such as those described above, can be useful for obtaining a full length coding sequence from a partial cDNA sequence. One such amplification technique is inverse PCR (see Triglia et al., Nucl Acids Res. 16:8186,1988), which uses restriction enzymes to generate a fragment in the known region of the gene. The fragment is then circularized by intramolecular ligation and used as a template for PCR with divergent primers derived from the known region. Within an alternative approach, sequences adjacent to a partial sequence may be retrieved by amplification with a primer to a linker sequence and a primer specific to a known region. The amplified sequences are typically subjected to a second round of amplification with the same linker primer and a second primer specific to the known region. A variation on this procedure, which employs two primers that initiate extension in opposite directions from the known sequence, is described in WO 96/38591. Another such technique is known as “rapid amplification of cDNA ends” or RACE. This technique involves the use of an internal primer and an external primer, which hybridizes to a polyA region or vector sequence, to identify sequences that are 5′ and 3′ of a known sequence. Additional techniques include capture PCR (Lagerstrom et al., PCR Methods Applic. 1:111-19, 1991) and walking PCR (Parker et al., Nucl. Acids. Res. 19:3055-60, 1991). Other methods employing amplification may also be employed to obtain a full length cDNA sequence.

[0159] In certain instances, it is possible to obtain a full length cDNA sequence by analysis of sequences provided in an expressed sequence tag (EST) database, such as that available from GenBank. Searches for overlapping ESTs may generally be performed using well known programs (e.g., NCBI BLAST searches), and such ESTs may be used to generate a contiguous full length sequence. Full length DNA sequences may also be obtained by analysis of genomic fragments.

[0160] In other embodiments of the invention, polynucleotide sequences or fragments thereof which encode polypeptides of the invention, or fusion proteins or functional equivalents thereof, may be used in recombinant DNA molecules to direct expression of a polypeptide in appropriate host cells. Due to the inherent degeneracy of the genetic code, other DNA sequences that encode substantially the same or a functionally equivalent amino acid sequence may be produced and these sequences may be used to clone and express a given polypeptide.

[0161] As will be understood by those of skill in the art, it may be advantageous in some instances to produce polypeptide-encoding nucleotide sequences possessing non-naturally occurring codons. For example, codons preferred by a particular prokaryotic or eukaryotic host can be selected to increase the rate of protein expression or to produce a recombinant RNA transcript having desirable properties, such as a half-life which is longer than that of a transcript generated from the naturally occurring sequence.

[0162] Moreover, the polynucleotide sequences of the present invention can be engineered using methods generally known in the art in order to alter polypeptide encoding sequences for a variety of reasons, including but not limited to, alterations which modify the cloning, processing, and/or expression of the gene product. For example, DNA shuffling by random fragmentation and PCR reassembly of gene fragments and synthetic oligonucleotides may be used to engineer the nucleotide sequences. In addition, site-directed mutagenesis may be used to insert new restriction sites, alter glycosylation patterns, change codon preference, produce splice variants, or introduce mutations, and so forth.

[0163] In another embodiment of the invention, natural, modified, or recombinant nucleic acid sequences may be ligated to a heterologous sequence to encode a fusion protein. For example, to screen peptide libraries for inhibitors of polypeptide activity, it may be useful to encode a chimeric protein that can be recognized by a commercially available antibody. A fusion protein may also be engineered to contain a cleavage site located between the polypeptide-encoding sequence and the heterologous protein sequence, so that the polypeptide may be cleaved and purified away from the heterologous moiety.

[0164] Sequences encoding a desired polypeptide may be synthesized, in whole or in part, using chemical methods well known in the art (see Caruthers, M. H. et al. (1980) Nucl. Acids Res. Symp. Ser. 215-223, Horn, T. et al. (1980) Nucl. Acids Res. Symp. Ser. 225-232). Alternatively, the protein itself may be produced using chemical methods to synthesize the amino acid sequence of a polypeptide, or a portion thereof. For example, peptide synthesis can be performed using various solid-phase techniques (Roberge, J. Y. et al. (1995) Science 269:202-204) and automated synthesis may be achieved, for example, using the ABI 431A Peptide Synthesizer (Perkin Elmer, Palo Alto, Calif.).

[0165] A newly synthesized peptide may be substantially purified by preparative high performance liquid chromatography (e.g., Creighton, T. (1983) Proteins, Structures and Molecular Principles, W H Freeman and Co., New York, N.Y.) or other comparable techniques available in the art. The composition of the synthetic peptides may be confirmed by amino acid analysis or sequencing (e.g., the Edman degradation procedure). Additionally, the amino acid sequence of a polypeptide, or any part thereof, may be altered during direct synthesis and/or combined using chemical methods with sequences from other proteins, or any part thereof, to produce a variant polypeptide.

[0166] In order to express a desired polypeptide, the nucleotide sequences encoding the polypeptide, or functional equivalents, may be inserted into appropriate expression vector, i.e., a vector which contains the necessary elements for the transcription and translation of the inserted coding sequence. Methods which are well known to those skilled in the art may be used to construct expression vectors containing sequences encoding a polypeptide of interest and appropriate transcriptional and translational control elements. These methods include in vitro recombinant DNA techniques, synthetic techniques, and in vivo genetic recombination. Such techniques are described, for example, in Sambrook, J. et al. (1989) Molecular Cloning, A Laboratory Manual, Cold Spring Harbor Press, Plainview, N.Y., and Ausubel, F. M. et al. (1989) Current Protocols in Molecular Biology, John Wiley & Sons, New York. N.Y.

[0167] A variety of expression vector/host systems may be utilized to contain and express polynucleotide sequences. These include, but are not limited to, microorganisms such as bacteria transformed with recombinant bacteriophage, plasmid, or cosmid DNA expression vectors; yeast transformed with yeast expression vectors; insect cell systems infected with virus expression vectors (e.g., baculovirus); plant cell systems transformed with virus expression vectors (e.g., cauliflower mosaic virus, CaMV; tobacco mosaic virus, TMV) or with bacterial expression vectors (e.g., Ti or pBR322 plasmids); or animal cell systems.

[0168] The “control elements” or “regulatory sequences” present in an expression vector are those non-translated regions of the vector—enhancers, promoters, 5′ and 3′ untranslated regions—which interact with host cellular proteins to carry out transcription and translation. Such elements may vary in their strength and specificity. Depending on the vector system and host utilized, any number of suitable transcription and translation elements, including constitutive and inducible promoters, may be used. For example, when cloning in bacterial systems, inducible promoters such as the hybrid lacZ promoter of the pBLUESCRIPT phagemid (Stratagene, La Jolla, Calif.) or pSPORT1 plasmid (Gibco BRL, Gaithersburg, Md.) and the like may be used. In mammalian cell systems, promoters from mammalian genes or from mammalian viruses are generally preferred. If it is necessary to generate a cell line that contains multiple copies of the sequence encoding a polypeptide, vectors based on SV40 or EBV may be advantageously used with an appropriate selectable marker.

[0169] In bacterial systems, any of a number of expression vectors may be selected depending upon the use intended for the expressed polypeptide. For example, when large quantities are needed, for example for the induction of antibodies, vectors which direct high level expression of fusion proteins that are readily purified may be used. Such vectors include, but are not limited to, the multifunctional E. coli cloning and expression vectors such as pBLUESCRIPT (Stratagene), in which the sequence encoding the polypeptide of interest may be ligated into the vector in frame with sequences for the amino-terminal Met and the subsequent 7 residues of .beta.-galactosidase so that a hybrid protein is produced; pIN vectors (Van Heeke, G. and S. M. Schuster (1989) J. Biol. Chem. 264:5503-5509); and the like. pGEX Vectors (Promega, Madison, Wis.) may also be used to express foreign polypeptides as fusion proteins with glutathione S-transferase (GST). In general, such fusion proteins are soluble and can easily be purified from lysed cells by adsorption to glutathione-agarose beads followed by elution in the presence of free glutathione. Proteins made in such systems may be designed to include heparin, thrombin, or factor XA protease cleavage sites so that the cloned polypeptide of interest can be released from the GST moiety at will.

[0170] In the yeast, Saccharomyces cerevisiae, a number of vectors containing constitutive or inducible promoters such as alpha factor, alcohol oxidase, and PGH may be used. For reviews, see Ausubel et al. (supra) and Grant et al. (1987) Methods Enzymol. 153:516-544.

[0171] In cases where plant expression vectors are used, the expression of sequences encoding polypeptides may be driven by any of a number of promoters. For example, viral promoters such as the 35S and 19S promoters of CaMV may be used alone or in combination with the omega leader sequence from TMV (Takamatsu, N. (1987) EMBO J. 6:307-311. Alternatively, plant promoters such as the small subunit of RUBISCO or heat shock promoters may be used (Coruzzi, G. et al. (1984) EMBO J. 3:1671-1680; Broglie, R. et al. (1984) Science 224:838-843; and Winter, J. et al. (1991) Results Probl. Cell Differ. 17:85-105). These constructs can be introduced into plant cells by direct DNA transformation or pathogen-mediated transfection. Such techniques are described in a number of generally available reviews (see, for example, Hobbs, S. or Murry, L. E. in McGraw Hill Yearbook of Science and Technology (1992) McGraw Hill, New York, N.Y.; pp. 191-196).

[0172] An insect system may also be used to express a polypeptide of interest. For example, in one such system, Autographa californica nuclear polyhedrosis virus (AcNPV) is used as a vector to express foreign genes in Spodoptera frugiperda cells or in Trichoplusia larvae. The sequences encoding the polypeptide may be cloned into a non-essential region of the virus, such as the polyhedrin gene, and placed under control of the polyhedrin promoter. Successful insertion of the polypeptide-encoding sequence will render the polyhedrin gene inactive and produce recombinant virus lacking coat protein. The recombinant viruses may then be used to infect, for example, S. frugiperda cells or Trichoplusia larvae in which the polypeptide of interest may be expressed (Engelhard, E. K. et al. (1994) Proc. Natl. Acad. Sci. 91:3224-3227).

[0173] In mammalian host cells, a number of viral-based expression systems are generally available. For example, in cases where an adenovirus is used as an expression vector, sequences encoding a polypeptide of interest may be ligated into an adenovirus transcription/translation complex consisting of the late promoter and tripartite leader sequence. Insertion in a non-essential E1 or E3 region of the viral genome may be used to obtain a viable virus which is capable of expressing the polypeptide in infected host cells (Logan, J. and Shenk, T. (1984) Proc. Natl. Acad. Sci. 81:3655-3659). In addition, transcription enhancers, such as the Rous sarcoma virus (RSV) enhancer, may be used to increase expression in mammalian host cells.

[0174] Specific initiation signals may also be used to achieve more efficient translation of sequences encoding a polypeptide of interest. Such signals include the ATG initiation codon and adjacent sequences. In cases where sequences encoding the polypeptide, its initiation codon, and upstream sequences are inserted into the appropriate expression vector, no additional transcriptional or translational control signals may be needed. However, in cases where only coding sequence, or a portion thereof, is inserted, exogenous translational control signals including the ATG initiation codon should be provided. Furthermore, the initiation codon should be in the correct reading frame to ensure translation of the entire insert. Exogenous translational elements and initiation codons may be of various origins, both natural and synthetic. The efficiency of expression may be enhanced by the inclusion of enhancers which are appropriate for the particular cell system which is used, such as those described in the literature (Scharf, D. et al. (1994) Results Probl. Cel Differ. 20:125-162).

[0175] In addition, a host cell strain may be chosen for its ability to modulate the expression of the inserted sequences or to process the expressed protein in the desired fashion. Such modifications of the polypeptide include, but are not limited to, acetylation, carboxylation. glycosylation, phosphorylation, lipidation, and acylation. Post-translational processing which cleaves a “prepro” form of the protein may also be used to facilitate correct insertion, folding and/or function. Different host cells such as CHO, COS, HeLa, MDCK, HEK293, and W138, which have specific cellular machinery and characteristic mechanisms for such post-translational activities, may be chosen to ensure the correct modification and processing of the foreign protein.

[0176] For long-term, high-yield production of recombinant proteins, stable expression is generally preferred. For example, cell lines which stably express a polynucleotide of interest may be transformed using expression vectors which may contain viral origins of replication and/or endogenous expression elements and a selectable marker gene on the same or on a separate vector. Following the introduction of the vector, cells may be allowed to grow for 1-2 days in an enriched media before they are switched to selective media. The purpose of the selectable marker is to confer resistance to selection, and its presence allows growth and recovery of cells which successfully express the introduced sequences. Resistant clones of stably transformed cells may be proliferated using tissue culture techniques appropriate to the cell type.

[0177] Any number of selection systems may be used to recover transformed cell lines. These include, but are not limited to, the herpes simplex virus thymidine kinase (Wigler, M. et al. (1977) Cell 11:223-32) and adenine phosphoribosyltransferase (Lowy, I. et al. (1990) Cell 22:817-23) genes which can be employed in tk.sup.- or aprt.sup.- cells, respectively. Also, antimetabolite, antibiotic or herbicide resistance can be used as the basis for selection; for example, dhfr which confers resistance to methotrexate (Wigler, M. et al. (1980) Proc. Natl. Acad. Sci. 77:3567-70); npt, which confers resistance to the aminoglycosides, neomycin and G-418 (Colbere-Garapin, F. et al (1981) J. Mol. Biol. 150:1-14); and als or pat, which confer resistance to chlorsulfuron and phosphinotricin acetyltransferase, respectively (Murry, supra). Additional selectable genes have been described, for example, trpB, which allows cells to utilize indole in place of tryptophan, or hisD, which allows cells to utilize histinol in place of histidine (Hartman, S. C. and R. C. Mulligan (1988) Proc. Natl. Acad. Sci. 85:8047-51). The use of visible markers has gained popularity with such markers as anthocyanins, beta-glucuronidase and its substrate GUS, and luciferase and its substrate luciferin, being widely used not only to identify transformants, but also to quantify the amount of transient or stable protein expression attributable to a specific vector system (Rhodes, C. A. et al. (1995) Methods Mol. Biol. 55:121-131).

[0178] Although the presence/absence of marker gene expression suggests that the gene of interest is also present, its presence and expression may need to be confirmed. For example, if the sequence encoding a polypeptide is inserted within a marker gene sequence, recombinant cells containing sequences can be identified by the absence of marker gene function. Alternatively, a marker gene can be placed in tandem with a polypeptide-encoding sequence under the control of a single promoter. Expression of the marker gene in response to induction or selection usually indicates expression of the tandem gene as well.

[0179] Alternatively, host cells that contain and express a desired polynucleotide sequence may be identified by a variety of procedures known to those of skill in the art. These procedures include, but are not limited to, DNA-DNA or DNA-RNA hybridizations and protein bioassay or immunoassay techniques which include, for example, membrane, solution, or chip based technologies for the detection and/or quantification of nucleic acid or protein.

[0180] A variety of protocols for detecting and measuring the expression of polynucleotide-encoded products, using either polyclonal or monoclonal antibodies specific for the product are known in the art. Examples include enzyme-linked immunosorbent assay (ELISA), radioimmunoassay (RIA), and fluorescence activated cell sorting (FACS). A two-site, monoclonal-based immunoassay utilizing monoclonal antibodies reactive to two non-interfering epitopes on a given polypeptide may be preferred for some applications, but a competitive binding assay may also be employed. These and other assays are described, among other places, in Hampton, R. et al. (1990; Serological Methods, a Laboratory Manual, APS Press, St Paul. Minn.) and Maddox, D. E. et al. (1983; J. Exp. Med. 158:1211-1216).

[0181] A wide variety of labels and conjugation techniques are known by those skilled in the art and may be used in various nucleic acid and amino acid assays. Means for producing labeled hybridization or PCR probes for detecting sequences related to polynucleotides include oligolabeling, nick translation, end-labeling or PCR amplification using a labeled nucleotide. Alternatively, the sequences, or any portions thereof may be cloned into a vector for the production of an mRNA probe. Such vectors are known in the art, are commercially available, and may be used to synthesize RNA probes in vitro by addition of an appropriate RNA polymerase such as T7, T3, or SP6 and labeled nucleotides. These procedures may be conducted using a variety of commercially available kits. Suitable reporter molecules or labels, which may be used include radionuclides, enzymes, fluorescent, chemiluminescent, or chromogenic agents as well as substrates, cofactors, inhibitors, magnetic particles, and the like.

[0182] Host cells transformed with a polynucleotide sequence of interest may be cultured under conditions suitable for the expression and recovery of the protein from cell culture. The protein produced by a recombinant cell may be secreted or contained intracellularly depending on the sequence and/or the vector used. As will be understood by those of skill in the art, expression vectors containing polynucleotides of the invention may be designed to contain signal sequences which direct secretion of the encoded polypeptide through a prokaryotic or eukaryotic cell membrane. Other recombinant constructions may be used to join sequences encoding a polypeptide of interest to nucleotide sequence encoding a polypeptide domain which will facilitate purification of soluble proteins. Such purification facilitating domains include, but are not limited to, metal chelating peptides such as histidine-tryptophan modules that allow purification on immobilized metals, protein A domains that allow purification on immobilized immunoglobulin, and the domain utilized in the FLAGS extension/affinity purification system (Immunex Corp., Seattle, Wash.). The inclusion of cleavable linker sequences such as those specific for Factor XA or enterokinase (Invitrogen. San Diego, Calif.) between the purification domain and the encoded polypeptide may be used to facilitate purification. One such expression vector provides for expression of a fusion protein containing a polypeptide of interest and a nucleic acid encoding 6 histidine residues preceding a thioredoxin or an enterokinase cleavage site. The histidine residues facilitate purification on IMIAC (immobilized metal ion affinity chromatography) as described in Porath, J. et al. (1992, Prot Exp. Purif. 3:263-281) while the enterokinase cleavage site provides a means for purifying the desired polypeptide from the fusion protein. A discussion of vectors which contain fusion proteins is provided in Kroll, D. J. et al. (1993; DNA Cell Biol. 12:441-453).

[0183] In addition to recombinant production methods, polypeptides of the invention, and fragments thereof, may be produced by direct peptide synthesis using solid-phase techniques (Merrifield J. (1963) J. Am. Chem. Soc. 85:2149-2154). Protein synthesis may be performed using manual techniques or by automation. Automated synthesis may be achieved, for example, using Applied Biosystems 431A Peptide Synthesizer (Perkin Elmer). Alternatively, various fragments may be chemically synthesized separately and combined using chemical methods to produce the full length molecule.

[0184] Antibody Compositions, Fragments Thereof and Other Binding Agents

[0185] According to another aspect, the present invention further provides binding agents, such as antibodies and antigen-binding fragments thereof, that exhibit immunological binding to a tumor polypeptide disclosed herein, or to a portion, variant or derivative thereof. An antibody, or antigen-binding fragment thereof, is said to “specifically bind,” “immunogically bind,” and/or is “immunologically reactive” to a polypeptide of the invention if it reacts at a detectable level (within, for example, an ELISA assay) with the polypeptide, and does not react detectably with unrelated polypeptides under similar conditions.

[0186] Immunological binding, as used in this context, generally refers to the non-covalent interactions of the type which occur between an immunoglobulin molecule and an antigen for which the immunoglobulin is specific. The strength, or affinity of immunological binding interactions can be expressed in terms of the dissociation constant (K_{d}) of the interaction, wherein a smaller K_{d} represents a greater affinity. Immunological binding properties of selected polypeptides can be quantified using methods well known in the art. One such method entails measuring the rates of antigen-binding site/antigen complex formation and dissociation, wherein those rates depend on the concentrations of the complex partners, the affinity of the interaction, and on geometric parameters that equally influence the rate in both directions. Thus, both the “on rate constant” (Kₒₙ) and the “off rate constant” (K_{off}) can be determined by calculation of the concentrations and the actual rates of association and dissociation. The ratio of K_{off}/Kₒₙ enables cancellation of all parameters not related to affinity, and is thus equal to the dissociation constant K_{d}. See, generally, Davies et al. (1990) Annual Rev. Biochem. 59:439-473.

[0187] An “antigen-binding site,” or “binding portion” of an antibody refers to the part of the immunoglobulin molecule that participates in antigen binding. The antigen binding site is formed by amino acid residues of the N-terminal variable (“V”) regions of the heavy (“H”) and light (“L”) chains. Three highly divergent stretches within the V regions of the heavy and light chains are referred to as “hypervariable regions” which are interposed between more conserved flanking stretches known as “framework regions,” or “FRs”. Thus the term “FR” refers to amino acid sequences which are naturally found between and adjacent to hypervariable regions in immunoglobulins. In an antibody molecule, the three hypervariable regions of a light chain and the three hypervariable regions of a heavy chain are disposed relative to each other in three dimensional space to form an antigen-binding surface. The antigen-binding surface is complementary to the three-dimensional surface of a bound antigen, and the three hypervariable regions of each of the heavy and light chains are referred to as “complementarity-determining regions,” or “CDRs.”

[0188] Binding agents may be further capable of differentiating between patients with and without a cancer, such as colon cancer, using the representative assays provided herein. For example, antibodies or other binding agents that bind to a tumor protein will preferably generate a signal indicating the presence of a cancer in at least about 20% of patients with the disease, more preferably at least about 30% of patients. Alternatively, or in addition, the antibody will generate a negative signal indicating the absence of the disease in at least about 90% of individuals without the cancer. To determine whether a binding agent satisfies this requirement, biological samples (e.g., blood, sera, sputum, urine and/or tumor biopsies) from patients with and without a cancer (as determined using standard clinical tests) may be assayed as described herein for the presence of polypeptides that bind to the binding agent. Preferably, a statistically significant number of samples with and without the disease will be assayed. Each binding agent should satisfy the above criteria; however, those of ordinary skill in the art will recognize that binding agents may be used in combination to improve sensitivity.

[0189] Any agent that satisfies the above requirements may be a binding agent. For example, a binding agent may be a ribosome, with or without a peptide component, an RNA molecule or a polypeptide. In a preferred embodiment, a binding agent is an antibody or an antigen-binding fragment thereof. Antibodies may be prepared by any of a variety of techniques known to those of ordinary skill in the art. See, e.g., Harlow and Lane, Antibodies: A Laboratory Manual, Cold Spring Harbor Laboratory, 1988. In general, antibodies can be produced by cell culture techniques, including the generation of monoclonal antibodies as described herein, or via transfection of antibody genes into suitable bacterial or mammalian cell hosts, in order to allow for the production of recombinant antibodies. In one technique, an immunogen comprising the polypeptide is initially injected into any of a wide variety of mammals (e.g., mice, rats, rabbits, sheep or goats). In this step, the polypeptides of this invention may serve as the immunogen without modification. Alternatively, particularly for relatively short polypeptides, a superior immune response may be elicited if the polypeptide is joined to a carrier protein, such as bovine serum albumin or keyhole limpet hemocyanin. The immunogen is injected into the animal host, preferably according to a predetermined schedule incorporating one or more booster immunizations, and the animals are bled periodically. Polyclonal antibodies specific for the polypeptide may then be purified from such antisera by, for example, affinity chromatography using the polypeptide coupled to a suitable solid support.

[0190] Monoclonal antibodies specific for an antigenic polypeptide of interest may be prepared, for example, using the technique of Kohler and Milstein, Eur. J. Immunol. 6:511-519, 1976, and improvements thereto. Briefly, these methods involve the preparation of immortal cell lines capable of producing antibodies having the desired specificity (i.e., reactivity with the polypeptide of interest). Such cell lines may be produced, for example, from spleen cells obtained from an animal immunized as described above. The spleen cells are then immortalized by, for example, fusion with a myeloma cell fusion partner, preferably one that is syngeneic with the immunized animal. A variety of fusion techniques may be employed. For example, the spleen cells and myeloma cells may be combined with a nonionic detergent for a few minutes and then plated at low density on a selective medium that supports the growth of hybrid cells, but not myeloma cells. A preferred selection technique uses HAT (hypoxanthine, aminopterin, thymidine) selection. After a sufficient time, usually about 1 to 2 weeks, colonies of hybrids are observed. Single colonies are selected and their culture supernatants tested for binding activity against the polypeptide. Hybridomas having high reactivity and specificity are preferred.

[0191] Monoclonal antibodies may be isolated from the supernatants of growing hybridoma colonies. In addition, various techniques may be employed to enhance the yield, such as injection of the hybridoma cell line into the peritoneal cavity of a suitable vertebrate host, such as a mouse. Monoclonal antibodies may then be harvested from the ascites fluid or the blood. Contaminants may be removed from the antibodies by conventional techniques, such as chromatography, gel filtration, precipitation, and extraction. The polypeptides of this invention may be used in the purification process in, for example, an affinity chromatography step.

[0192] A number of therapeutically useful molecules are known in the art which comprise antigen-binding sites that are capable of exhibiting immunological binding properties of an antibody molecule. The proteolytic enzyme papain preferentially cleaves IgG molecules to yield several fragments, two of which (the “F(ab)” fragments) each comprise a covalent heterodimer that includes an intact antigen-binding site. The enzyme pepsin is able to cleave IgG molecules to provide several fragments, including the “F(ab′)₂” fragment which comprises both antigen-binding sites. An “Fv” fragment can be produced by preferential proteolytic cleavage of an IgM, and on rare occasions IgG or IgA immunoglobulin molecule. Fv fragments are, however, more commonly derived using recombinant techniques known in the art. The Fv fragment includes a non-covalent V_{H}::V_{L} heterodimer including an antigen-binding site which retains much of the antigen recognition and binding capabilities of the native antibody molecule. Inbar et al. (1972) Proc. Nat. Acad. Sci. USA 69:2659-2662; Hochman et al. (1976) Biochem 15:2706-2710; and Ehrlich et al. (1980) Biochem 19:4091-4096.

[0193] A single chain Fv (“sFv”) polypeptide is a covalently linked V_{H}::V_{L} heterodimer which is expressed from a gene fusion including V_{H}- and V_{L}-encoding genes linked by a peptide-encoding linker. Huston et al. (1988) Proc. Nat. Acad. Sci. USA 85(16):5879-5883. A number of methods have been described to discern chemical structures for converting the naturally aggregated—but chemically separated—light and heavy polypeptide chains from an antibody V region into an sFv molecule which will fold into a three dimensional structure substantially similar to the structure of an antigen-binding site. See, e.g., U.S. Pat. Nos. 5,091,513 and 5,132,405, to Huston et al.; and U.S. Pat. No. 4,946,778, to Ladner et al.

[0194] Each of the above-described molecules includes a heavy chain and a light chain CDR set, respectively interposed between a heavy chain and a light chain FR set which provide support to the CDRS and define the spatial relationship of the CDRs relative to each other. As used herein, the term “CDR set” refers to the three hypervariable regions of a heavy or light chain V region. Proceeding from the N-terminus of a heavy or light chain, these regions are denoted as “CDR1,” “CDR2,” and “CDR3” respectively. An antigen-binding site, therefore, includes six CDRS, comprising the CDR set from each of a heavy and a light chain V region. A polypeptide comprising a single CDR, (e.g., a CDR1, CDR2 or CDR3) is referred to herein as a “molecular recognition unit.” Crystallographic analysis of a number of antigen-antibody complexes has demonstrated that the amino acid residues of CDRs form extensive contact with bound antigen, wherein the most extensive antigen contact is with the heavy chain CDR3. Thus, the molecular recognition units are primarily responsible for the specificity of an antigen-binding site.

[0195] As used herein, the term “FR set” refers to the four flanking amino acid sequences which frame the CDRs of a CDR set of a heavy or light chain V region. Some FR residues may contact bound antigen; however, FRs are primarily responsible for folding the V region into the antigen-binding site, particularly the FR residues directly adjacent to the CDRS. Within FRs, certain amino residues and certain structural features are very highly conserved. In this regard, all V region sequences contain an internal disulfide loop of around 90 amino acid residues. When the V regions fold into a binding-site, the CDRs are displayed as projecting loop motifs which form an antigen-binding surface. It is generally recognized that there are conserved structural regions of FRs which influence the folded shape of the CDR loops into certain “canonical” structures—regardless of the precise CDR amino acid sequence. Further, certain FR residues are known to participate in non-covalent interdomain contacts which stabilize the interaction of the antibody heavy and light chains.

[0196] A number of “humanized” antibody molecules comprising an antigen-binding site derived from a non-human immunoglobulin have been described, including chimeric antibodies having rodent V regions and their associated CDRs fused to human constant domains (Winter et al. (1991) Nature 349:293-299; Lobuglio et al. (1989) Proc. Nat. Acad. Sci. USA 86:4220-4224; Shaw et al. (1987) J Immunol. 138:4534-4538; and Brown et al. (1987) Cancer Res. 47:3577-3583), rodent CDRs grafted into a human supporting FR prior to fusion with an appropriate human antibody constant domain (Riechmann et al. (1988) Nature 332:323-327; Verhoeyen et al. (1988) Science 239:1534-1536; and Jones et al. (1986) Nature 321:522-525), and rodent CDRs supported by recombinantly veneered rodent FRs (European Pat. Publication No. 519,596, published Dec. 23, 1992). These “humanized” molecules are designed to minimize unwanted immunological response toward rodent antihuman antibody molecules which limits the duration and effectiveness of therapeutic applications of those moieties in human recipients.

[0197] As used herein, the terms “veneered FRs” and “recombinantly veneered FRs” refer to the selective replacement of FR residues from, e.g., a rodent heavy or light chain V region, with human FR residues in order to provide a xenogeneic molecule comprising an antigen-binding site which retains substantially all of the native FR polypeptide folding structure. Veneering techniques are based on the understanding that the ligand binding characteristics of an antigen-binding site are determined primarily by the structure and relative disposition of the heavy and light chain CDR sets within the antigen-binding surface. Davies et al. (1990) Ann. Rev. Biochem. 59:439-473. Thus, antigen binding specificity can be preserved in a humanized antibody only wherein the CDR structures, their interaction with each other, and their interaction with the rest of the V region domains are carefully maintained. By using veneering techniques, exterior (e.g., solvent-accessible) FR residues which are readily encountered by the immune system are selectively replaced with human residues to provide a hybrid molecule that comprises either a weakly immunogenic, or substantially non-immunogenic veneered surface.

[0198] The process of veneering makes use of the available sequence data for human antibody variable domains compiled by Kabat et al., in Sequences of Proteins of Immunological Interest, 4th ed., (U.S. Dept. of Health and Human Services, U.S. Government Printing Office, 1987), updates to the Kabat database, and other accessible U.S. and foreign databases (both nucleic acid and protein). Solvent accessibilities of V region amino acids can be deduced from the known three-dimensional structure for human and murine antibody fragments. There are two general steps in veneering a murine antigen-binding site. Initially, the FRs of the variable domains of an antibody molecule of interest are compared with corresponding FR sequences of human variable domains obtained from the above-identified sources. The most homologous human V regions are then compared residue by residue to corresponding murine amino acids. The residues in the murine FR which differ from the human counterpart are replaced by the residues present in the human moiety using recombinant techniques well known in the art. Residue switching is only carried out with moieties which are at least partially exposed (solvent accessible), and care is exercised in the replacement of amino acid residues which may have a significant effect on the tertiary structure of V region domains, such as proline, glycine and charged amino acids.

[0199] In this manner, the resultant “veneered” murine antigen-binding sites are thus designed to retain the murine CDR residues, the residues substantially adjacent to the CDRs, the residues identified as buried or mostly buried (solvent inaccessible), the residues believed to participate in non-covalent (e.g., electrostatic and hydrophobic) contacts between heavy and light chain domains, and the residues from conserved structural regions of the FRs which are believed to influence the “canonical” tertiary structures of the CDR loops. These design criteria are then used to prepare recombinant nucleotide sequences which combine the CDRs of both the heavy and light chain of a murine antigen-binding site into human-appearing FRs that can be used to transfect mammalian cells for the expression of recombinant human antibodies which exhibit the antigen specificity of the murine antibody molecule.

[0200] In another embodiment of the invention, monoclonal antibodies of the present invention may be coupled to one or more therapeutic agents. Suitable agents in this regard include radionuclides, differentiation inducers, drugs, toxins, and derivatives thereof. Preferred radionuclides include ⁹⁰Y, ¹²³I, ¹²⁵I, ¹³¹I, ¹⁸⁶Re, ¹⁸⁸Re, ²¹¹At, and ²¹²Bi. Preferred drugs include methotrexate, and pyrimidine and purine analogs. Preferred differentiation inducers include phorbol esters and butyric acid. Preferred toxins include ricin, abrin, diptheria toxin, cholera toxin, gelonin, Pseudomonas exotoxin, Shigella toxin, and pokeweed antiviral protein.

[0201] A therapeutic agent may be coupled (e.g., covalently bonded) to a suitable monoclonal antibody either directly or indirectly (e.g., via a linker group). A direct reaction between an agent and an antibody is possible when each possesses a substituent capable of reacting with the other. For example, a nucleophilic group, such as an amino or sulfhydryl group, on one may be capable of reacting with a carbonyl-containing group, such as an anhydride or an acid halide, or with an alkyl group containing a good leaving group (e.g., a halide) on the other.

[0202] Alternatively, it may be desirable to couple a therapeutic agent and an antibody via a linker group. A linker group can function as a spacer to distance an antibody from an agent in order to avoid interference with binding capabilities. A linker group can also serve to increase the chemical reactivity of a substituent on an agent or an antibody, and thus increase the coupling efficiency. An increase in chemical reactivity may also facilitate the use of agents, or functional groups on agents, which otherwise would not be possible.

[0203] It will be evident to those skilled in the art that a variety of bifunctional or polyfunctional reagents, both homo- and hetero-functional (such as those described in the catalog of the Pierce Chemical Co., Rockford, Ill.), may be employed as the linker group. Coupling may be effected, for example, through amino groups, carboxyl groups, sulfhydryl groups or oxidized carbohydrate residues. There are numerous references describing such methodology, e.g., U.S. Pat. No. 4,671,958, to Rodwell et al.

[0204] Where a therapeutic agent is more potent when free from the antibody portion of the immunoconjugates of the present invention, it may be desirable to use a linker group which is cleavable during or upon internalization into a cell. A number of different cleavable linker groups have been described. The mechanisms for the intracellular release of an agent from these linker groups include cleavage by reduction of a disulfide bond (e.g., U.S. Pat. No. 4,489,710, to Spitler), by irradiation of a photolabile bond (e.g., U.S. Pat. No. 4,625,014, to Senter et al.), by hydrolysis of derivatized amino acid side chains (e.g., U.S. Pat. No. 4,638,045, to Kohn et al.), by serum complement-mediated hydrolysis (e.g., U.S. Pat. No. 4,671,958, to Rodwell et al.), and acid-catalyzed hydrolysis (e.g., U.S. Pat. No. 4,569,789, to Blattler et al.).

[0205] It may be desirable to couple more than one agent to an antibody. In one embodiment, multiple molecules of an agent are coupled to one antibody molecule. In another embodiment, more than one type of agent may be coupled to one antibody. Regardless of the particular embodiment, immunoconjugates with more than one agent may be prepared in a variety of ways. For example, more than one agent may be coupled directly to an antibody molecule, or linkers that provide multiple sites for attachment can be used. Alternatively, a carrier can be used.

[0206] A carrier may bear the agents in a variety of ways, including covalent bonding either directly or via a linker group. Suitable carriers include proteins such as albumins (e.g., U.S. Pat. No. 4,507,234, to Kato et al.), peptides and polysaccharides such as aminodextran (e.g., U.S. Pat. No. 4,699,784, to Shih et al.). A carrier may also bear an agent by noncovalent bonding or by encapsulation, such as within a liposome vesicle (e.g., U.S. Pat. Nos. 4,429,008 and 4,873,088). Carriers specific for radionuclide agents include radiohalogenated small molecules and chelating compounds. For example, U.S. Pat. No. 4,735,792 discloses representative radiohalogenated small molecules and their synthesis. A radionuclide chelate may be formed from chelating compounds that include those containing nitrogen and sulfur atoms as the donor atoms for binding the metal, or metal oxide, radionuclide. For example, U.S. Pat. No. 4,673,562, to Davison et al. discloses representative chelating compounds and their synthesis.

[0207] T Cell Compositions

[0208] The present invention, in another aspect, provides T cells specific for a tumor polypeptide disclosed herein, or for a variant or derivative thereof. Such cells may generally be prepared in vitro or ex vivo, using standard procedures. For example, T cells may be isolated from bone marrow, peripheral blood, or a fraction of bone marrow or peripheral blood of a patient, using a commercially available cell separation system, such as the Isolex™ System, available from Nexell Therapeutics, Inc. (Irvine, Calif.; see also U.S. Pat. No. 5,240,856; U.S. Pat. No. 5,215,926; WO 89/06280; WO 91/16116 and WO 92/07243). Alternatively, T cells may be derived from related or unrelated humans, non-human mammals, cell lines or cultures.

[0209] T cells may be stimulated with a polypeptide, polynucleotide encoding a polypeptide and/or an antigen presenting cell (APC) that expresses such a polypeptide. Such stimulation is performed under conditions and for a time sufficient to permit the generation of T cells that are specific for the polypeptide of interest. Preferably, a tumor polypeptide or polynucleotide of the invention is present within a delivery vehicle, such as a microsphere, to facilitate the generation of specific T cells.

[0210] T cells are considered to be specific for a polypeptide of the present invention if the T cells specifically proliferate, secrete cytokines or kill target cells coated with the polypeptide or expressing a gene encoding the polypeptide. T cell specificity may be evaluated using any of a variety of standard techniques. For example, within a chromium release assay or proliferation assay, a stimulation index of more than two fold increase in lysis and/or proliferation, compared to negative controls, indicates T cell specificity. Such assays may be performed, for example, as described in Chen et al., Cancer Res. 54:1065-1070, 1994. Alternatively, detection of the proliferation of T cells may be accomplished by a variety of known techniques. For example, T cell proliferation can be detected by measuring an increased rate of DNA synthesis (e.g., by pulse-labeling cultures of T cells with tritiated thymidine and measuring the amount of tritiated thymidine incorporated into DNA). Contact with a tumor polypeptide (100 ng/ml-100 μg/ml, preferably 200 ng/ml-25 μg/ml) for 3-7 days will typically result in at least a two fold increase in proliferation of the T cells. Contact as described above for 2-3 hours should result in activation of the T cells, as measured using standard cytokine assays in which a two fold increase in the level of cytokine release (e.g., TNF or IFN-γ) is indicative of T cell activation (see Coligan et al., Current Protocols in Immunology, vol. 1, Wiley Interscience (Greene 1998)). T cells that have been activated in response to a tumor polypeptide, polynucleotide or polypeptide-expressing APC may be CD4⁺ and/or CD8⁺. Tumor polypeptide-specific T cells may be expanded using standard techniques. Within preferred embodiments, the T cells are derived from a patient, a related donor or an unrelated donor, and are administered to the patient following stimulation and expansion.

[0211] For therapeutic purposes, CD4⁺ or CD8⁺ T cells that proliferate in response to a tumor polypeptide, polynucleotide or APC can be expanded in number either in vitro or in vivo. Proliferation of such T cells in vitro may be accomplished in a variety of ways. For example, the T cells can be re-exposed to a tumor polypeptide, or a short peptide corresponding to an immunogenic portion of such a polypeptide, with or without the addition of T cell growth factors, such as interleukin-2, and/or stimulator cells that synthesize a tumor polypeptide. Alternatively, one or more T cells that proliferate in the presence of the tumor polypeptide can be expanded in number by cloning. Methods for cloning cells are well known in the art, and include limiting dilution.

[0212] T Cell Receptor Compositions

[0213] The T cell receptor (TCR) consists of 2 different, highly variable polypeptide chains, termed the T-cell receptor α and β chains, that are linked by a disulfide bond (Janeway, Travers, Walport. Immunobiology. Fourth Ed., 148-159. Elsevier Science Ltd/Garland Publishing. 1999). The α/β heterodimer complexes with the invariant CD3 chains at the cell membrane. This complex recognizes specific antigenic peptides bound to MHC molecules. The enormous diversity of TCR specificities is generated much like immunoglobulin diversity, through somatic gene rearrangement. The β chain genes contain over 50 variable (V), 2 diversity (D), over 10 joining (J) segments, and 2 constant region segments (C). The α chain genes contain over 70 V segments, and over 60 J segments but no D segments, as well as one C segment. During T cell development in the thymus, the D to J gene rearrangement of the β chain occurs, followed by the V gene segment rearrangement to the DJ. This functional VDJ_{β} exon is transcribed and spliced to join to a C_{β}. For the α chain, a V_{α} gene segment rearranges to a J_{α} gene segment to create the functional exon that is then transcribed and spliced to the C_{α}. Diversity is further increased during the recombination process by the random addition of P and N-nucleotides between the V, D, and J segments of the β chain and between the V and J segments in the α chain (Janeway, Travers, Walport. Immunobiology. Fourth Ed., 98 and 150. Elsevier Science Ltd/Garland Publishing. 1999).

[0214] The present invention, in another aspect, provides TCRs specific for a polypeptide disclosed herein, or for a variant or derivative thereof. In accordance with the present invention, polynucleotide and amino acid sequences are provided for the V-J or V-D-J junctional regions or parts thereof for the alpha and beta chains of the T-cell receptor which recognize tumor polypeptides described herein. In general, this aspect of the invention relates to T-cell receptors which recognize or bind tumor polypeptides presented in the context of MHC. In a preferred embodiment the tumor antigens recognized by the T-cell receptors comprise a polypeptide of the present invention. For example, cDNA encoding a TCR specific for a colon tumor peptide can be isolated from T cells specific for a tumor polypeptide using standard molecular biological and recombinant DNA techniques.

[0215] This invention further includes the T-cell receptors or analogs thereof having substantially the same function or activity as the T-cell receptors of this invention which recognize or bind tumor polypeptides. Such receptors include, but are not limited to, a fragment of the receptor, or a substitution, addition or deletion mutant of a T-cell receptor provided herein. This invention also encompasses polypeptides or peptides that are substantially homologous to the T-cell receptors provided herein or that retain substantially the same activity. The term “analog” includes any protein or polypeptide having an amino acid residue sequence substantially identical to the T-cell receptors provided herein in which one or more residues, preferably no more than 5 residues, more preferably no more than 25 residues have been conservatively substituted with a functionally similar residue and which displays the functional aspects of the T-cell receptor as described herein.

[0216] The present invention further provides for suitable mammalian host cells, for example, non-specific T cells, that are transfected with a polynucleotide encoding TCRs specific for a polypeptide described herein, thereby rendering the host cell specific for the polypeptide. The α and β chains of the TCR may be contained on separate expression vectors or alternatively, on a single expression vector that also contains an internal ribosome entry site (IRES) for cap-independent translation of the gene downstream of the IRES. Said host cells expressing TCRs specific for the polypeptide may be used, for example, for adoptive immunotherapy of colon cancer as discussed further below.

[0217] In further aspects of the present invention, cloned TCRs specific for a polypeptide recited herein may be used in a kit for the diagnosis of colon cancer. For example, the nucleic acid sequence or portions thereof, of colon tumor-specific TCRs can be used as probes or primers for the detection of expression of the rearranged genes encoding the specific TCR in a biological sample. Therefore, the present invention further provides for an assay for detecting messenger RNA or DNA encoding the TCR specific for a polypeptide.

[0218] Pharmaceutical Compositions

[0219] In additional embodiments, the present invention concerns formulation of one or more of the polynucleotide, polypeptide, T-cell, TCR, and/or antibody compositions disclosed herein in pharmaceutically-acceptable carriers for administration to a cell or an animal, either alone, or in combination with one or more other modalities of therapy.

[0220] It will be understood that, if desired, a composition as disclosed herein may be administered in combination with other agents as well, such as, e.g., other proteins or polypeptides or various pharmaceutically-active agents. In fact, there is virtually no limit to other components that may also be included, given that the additional agents do not cause a significant adverse effect upon contact with the target cells or host tissues. The compositions may thus be delivered along with various other agents as required in the particular instance. Such compositions may be purified from host cells or other biological sources, or alternatively may be chemically synthesized as described herein. Likewise, such compositions may further comprise substituted or derivatized RNA or DNA compositions.

[0221] Therefore, in another aspect of the present invention, pharmaceutical compositions are provided comprising one or more of the polynucleotide, polypeptide, antibody, TCR, and/or T-cell compositions described herein in combination with a physiologically acceptable carrier. In certain preferred embodiments, the pharmaceutical compositions of the invention comprise immunogenic polynucleotide and/or polypeptide compositions of the invention for use in prophylactic and theraputic vaccine applications. Vaccine preparation is generally described in, for example, M. F. Powell and M. J. Newman, eds., “Vaccine Design (the subunit and adjuvant approach),” Plenum Press (NY, 1995). Generally, such compositions will comprise one or more polynucleotide and/or polypeptide compositions of the present invention in combination with one or more immunostimulants.

[0222] It will be apparent that any of the pharmaceutical compositions described herein can contain pharmaceutically acceptable salts of the polynucleotides and polypeptides of the invention. Such salts can be prepared, for example, from pharmaceutically acceptable non-toxic bases, including organic bases (e.g., salts of primary, secondary and tertiary amines and basic amino acids) and inorganic bases (e.g., sodium, potassium, lithium, ammonium, calcium and magnesium salts).

[0223] In another embodiment, illustrative immunogenic compositions, e.g., vaccine compositions, of the present invention comprise DNA encoding one or more of the polypeptides as described above, such that the polypeptide is generated in situ. As noted above, the polynucleotide may be administered within any of a variety of delivery systems known to those of ordinary skill in the art. Indeed, numerous gene delivery techniques are well known in the art, such as those described by Rolland, Crit. Rev. Therap. Drug Carrier Systems 15:143-198, 1998, and references cited therein. Appropriate polynucleotide expression systems will, of course, contain the necessary regulatory DNA regulatory sequences for expression in a patient (such as a suitable promoter and terminating signal). Alternatively, bacterial delivery systems may involve the administration of a bacterium (such as Bacillus-Calmette-Guerrin) that expresses an immunogenic portion of the polypeptide on its cell surface or secretes such an epitope.

[0224] Therefore, in certain embodiments, polynucleotides encoding immunogenic polypeptides described herein are introduced into suitable mammalian host cells for expression using any of a number of known viral-based systems. In one illustrative embodiment, retroviruses provide a convenient and effective platform for gene delivery systems. A selected nucleotide sequence encoding a polypeptide of the present invention can be inserted into a vector and packaged in retroviral particles using techniques known in the art. The recombinant virus can then be isolated and delivered to a subject. A number of illustrative retroviral systems have been described (e.g., U.S. Pat. No. 5,219,740; Miller and Rosman (1989) BioTechniques 7:980-990; Miller, A. D. (1990) Human Gene Therapy 1:5-14; Scarpa et al. (1991) Virology 180:849-852; Burns et al. (1993) Proc. Natl. Acad. Sci. USA 90:8033-8037; and Boris-Lawrie and Temin (1993) Cur. Opin. Genet. Develop. 3:102-109.

[0225] In addition, a number of illustrative adenovirus-based systems have also been described. Unlike retroviruses which integrate into the host genome, adenoviruses persist extrachromosomally thus minimizing the risks associated with insertional mutagenesis (Haj-Ahmad and Graham (1986) J. Virol. 57:267-274; Bett et al. (1993) J. Virol. 67:5911-5921; Mittereder et al. (1994) Human Gene Therapy 5:717-729; Seth et al. (1994) J. Virol. 68:933-940; Barr et al. (1994) Gene Therapy 1:51-58; Berkner, K. L. (1988) BioTechniques 6:616-629; and Rich et al. (1993) Human Gene Therapy 4:461-476).

[0226] Various adeno-associated virus (AAV) vector systems have also been developed for polynucleotide delivery. AAV vectors can be readily constructed using techniques well known in the art. See, e.g., U.S. Pat. Nos. 5,173,414 and 5,139,941; International Publication Nos. WO 92/01070 and WO 93/03769; Lebkowski et al. (1988) Molec. Cell. Biol. 8:3988-3996; Vincent et al. (1990) Vaccines 90 (Cold Spring Harbor Laboratory Press); Carter, B. J. (1992) Current Opinion in Biotechnology 3:533-539; Muzyczka, N. (1992) Current Topics in Microbiol. and Immunol. 158:97-129; Kotin, R. M. (1994) Human Gene Therapy 5:793-801; Shelling and Smith (1994) Gene Therapy 1:165-169; and Zhou et al. (1994) J. Exp. Med. 179:1867-1875.

[0227] Additional viral vectors useful for delivering the polynucleotides encoding polypeptides of the present invention by gene transfer include those derived from the pox family of viruses, such as vaccinia virus and avian poxvirus. By way of example, vaccinia virus recombinants expressing the novel molecules can be constructed as follows. The DNA encoding a polypeptide is first inserted into an appropriate vector so that it is adjacent to a vaccinia promoter and flanking vaccinia DNA sequences, such as the sequence encoding thymidine kinase (TK). This vector is then used to transfect cells which are simultaneously infected with vaccinia. Homologous recombination serves to insert the vaccinia promoter plus the gene encoding the polypeptide of interest into the viral genome. The resulting TK.sup.(−) recombinant can be selected by culturing the cells in the presence of 5-bromodeoxyuridine and picking viral plaques resistant thereto.

[0228] A vaccinia-based infection/transfection system can be conveniently used to provide for inducible, transient expression or coexpression of one or more polypeptides described herein in host cells of an organism. In this particular system, cells are first infected in vitro with a vaccinia virus recombinant that encodes the bacteriophage T7 RNA polymerase. This polymerase displays exquisite specificity in that it only transcribes templates bearing T7 promoters. Following infection, cells are transfected with the polynucleotide or polynucleotides of interest, driven by a T7 promoter. The polymerase expressed in the cytoplasm from the vaccinia virus recombinant transcribes the transfected DNA into RNA which is then translated into polypeptide by the host translational machinery. The method provides for high level, transient, cytoplasmic production of large quantities of RNA and its translation products. See, e.g., Elroy-Stein and Moss, Proc. Natl. Acad. Sci. USA (1990) 87:6743-6747; Fuerst et al. Proc. Natl. Acad. Sci. USA (1986) 83:8122-8126.

[0229] Alternatively, avipoxviruses, such as the fowlpox and canarypox viruses, can also be used to deliver the coding sequences of interest. Recombinant avipox viruses, expressing immunogens from mammalian pathogens, are known to confer protective immunity when administered to non-avian species. The use of an Avipox vector is particularly desirable in human and other mammalian species since members of the Avipox genus can only productively replicate in susceptible avian species and therefore are not infective in mammalian cells. Methods for producing recombinant Avipoxviruses are known in the art and employ genetic recombination, as described above with respect to the production of vaccinia viruses. See, e.g., WO 91/12882; WO 89/03429; and WO 92/03545.

[0230] Any of a number of alphavirus vectors can also be used for delivery of polynucleotide compositions of the present invention, such as those vectors described in U.S. Pat. Nos. 5,843,723; 6,015,686; 6,008,035 and 6,015,694. Certain vectors based on Venezuelan Equine Encephalitis (VEE) can also be used, illustrative examples of which can be found in U.S. Pat. Nos. 5,505,947 and 5,643,576.

[0231] Moreover, molecular conjugate vectors, such as the adenovirus chimeric vectors described in Michael et al. J. Biol. Chem. (1993) 268:6866-6869 and Wagner et al. Proc. Natl. Acad. Sci. USA (1992) 89:6099-6103, can also be used for gene delivery under the invention.

[0232] Additional illustrative information on these and other known viral-based delivery systems can be found, for example, in Fisher-Hoch et al., Proc. Natl. Acad. Sci. USA 86:317-321, 1989; Flexner et al., Ann. N.Y. Acad. Sci. 569:86-103, 1989; Flexner et al., Vaccine 8:17-21, 1990; U.S. Pat. Nos. 4,603,112, 4,769,330, and 5,017,487; WO 89/01973; U.S. Pat. No. 4,777,127; GB 2,200,651; EP 0,345,242; WO 91/02805; Berkner, Biotechniques 6:616-627, 1988; Rosenfeld et al., Science 252:431-434, 1991; Kolls et al., Proc. Natl. Acad. Sci. USA 91:215-219, 1994; Kass-Eisler et al., Proc. Natl. Acad. Sci. USA 90:11498-11502, 1993; Guzman et al., Circulation 88:2838-2848, 1993; and Guzman et al., Cir. Res. 73:1202-1207, 1993.

[0233] In certain embodiments, a polynucleotide may be integrated into the genome of a target cell. This integration may be in the specific location and orientation via homologous recombination (gene replacement) or it may be integrated in a random, non-specific location (gene augmentation). In yet further embodiments, the polynucleotide may be stably maintained in the cell as a separate, episomal segment of DNA. Such polynucleotide segments or “episomes” encode sequences sufficient to permit maintenance and replication independent of or in synchronization with the host cell cycle. The manner in which the expression construct is delivered to a cell and where in the cell the polynucleotide remains is dependent on the type of expression construct employed.

[0234] In another embodiment of the invention, a polynucleotide is administered/delivered as “naked” DNA, for example as described in Ulmer et al., Science 259:1745-1749, 1993 and reviewed by Cohen, Science 259:1691-1692, 1993. The uptake of naked DNA may be increased by coating the DNA onto biodegradable beads, which are efficiently transported into the cells.

[0235] In still another embodiment, a composition of the present invention can be delivered via a particle bombardment approach, many of which have been described. In one illustrative example, gas-driven particle acceleration can be achieved with devices such as those manufactured by Powderject Pharmaceuticals PLC (Oxford, UK) and Powderject Vaccines Inc. (Madison, Wis.), some examples of which are described in U.S. Pat. Nos. 5,846,796; 6,010,478; 5,865,796; 5,584,807; and EP Pat. No. 0500 799. This approach offers a needle-free delivery approach wherein a dry powder formulation of microscopic particles, such as polynucleotide or polypeptide particles, are accelerated to high speed within a helium gas jet generated by a hand held device, propelling the particles into a target tissue of interest.

[0236] In a related embodiment, other devices and methods that may be useful for gas-driven needle-less injection of compositions of the present invention include those provided by Bioject, Inc. (Portland, Oreg.), some examples of which are described in U.S. Pat. Nos. 4,790,824; 5,064,413; 5,312,335; 5,383,851; 5,399,163; 5,520,639 and 5,993,412.

[0237] According to another embodiment, the pharmaceutical compositions described herein will comprise one or more immunostimulants in addition to the immunogenic polynucleotide, polypeptide, antibody, T-cell, TCR, and/or APC compositions of this invention. An immunostimulant refers to essentially any substance that enhances or potentiates an immune response (antibody and/or cell-mediated) to an exogenous antigen. One preferred type of immunostimulant comprises an adjuvant. Many adjuvants contain a substance designed to protect the antigen from rapid catabolism, such as aluminum hydroxide or mineral oil, and a stimulator of immune responses, such as lipid A, Bortadella pertussis or Mycobacterium tuberculosis derived proteins. Certain adjuvants are commercially available as, for example, Freund's Incomplete Adjuvant and Complete Adjuvant (Difco Laboratories, Detroit, Mich.); Merck Adjuvant 65 (Merck and Company, Inc., Rahway, N.J.); AS-2 (SmithKline Beecham, Philadelphia, Pa.); aluminum salts such as aluminum hydroxide gel (alum) or aluminum phosphate; salts of calcium, iron or zinc; an insoluble suspension of acylated tyrosine; acylated sugars; cationically or anionically derivatized polysaccharides; polyphosphazenes; biodegradable microspheres; monophosphoryl lipid A and quil A. Cytokines, such as GM-CSF, interleukin-2, -7, -12, and other like growth factors, may also be used as adjuvants.

[0238] Within certain embodiments of the invention, the adjuvant composition is preferably one that induces an immune response predominantly of the Th1 type. High levels of Th1-type cytokines (e.g., IFNγ, TNFα, IL-2 and IL-12) tend to favor the induction of cell mediated immune responses to an administered antigen. In contrast, high levels of Th2-type cytokines (e.g., IL-4, IL-5, IL-6 and IL-10) tend to favor the induction of humoral immune responses. Following application of a vaccine as provided herein, a patient will support an immune response that includes Th1- and Th2-type responses. Within a preferred embodiment, in which a response is predominantly Th1-type, the level of Th1-type cytokines will increase to a greater extent than the level of Th2-type cytokines. The levels of these cytokines may be readily assessed using standard assays. For a review of the families of cytokines, see Mosmann and Coffman, Ann. Rev. Immunol 7:145-173, 1989.

[0239] Certain preferred adjuvants for eliciting a predominantly Th1-type response include, for example, a combination of monophosphoryl lipid A, preferably 3-de-O-acylated monophosphoryl lipid A, together with an aluminum salt. MPL® adjuvants are available from Corixa Corporation (Seattle, Wash.; see, for example, US Pat. Nos. 4,436,727; 4,877,611; 4,866,034 and 4,912,094). CpG-containing oligonucleotides (in which the CpG dinucleotide is unmethylated) also induce a predominantly Th1 response. Such oligonucleotides are well known and are described, for example, in WO 96/02555, WO 99/33488 and U.S. Pat. Nos. 6,008,200 and 5,856,462. Immunostimulatory DNA sequences are also described, for example, by Sato et al., Science 273:352, 1996. Another preferred adjuvant comprises a saponin, such as Quil A, or derivatives thereof, including QS21 and QS7 (Aquila Biopharmaceuticals Inc., Framingham, Mass.); Escin; Digitonin; or Gypsophila or Chenopodium quinoa saponins . Other preferred formulations include more than one saponin in the adjuvant combinations of the present invention, for example combinations of at least two of the following group comprising QS21, QS7, Quil A, β-escin, or digitonin.

[0240] Alternatively the saponin formulations may be combined with vaccine vehicles composed of chitosan or other polycationic polymers, polylactide and polylactide-co-glycolide particles, poly-N-acetyl glucosamine-based polymer matrix, particles composed of polysaccharides or chemically modified polysaccharides, liposomes and lipid-based particles, particles composed of glycerol monoesters, etc. The saponins may also be formulated in the presence of cholesterol to form particulate structures such as liposomes or ISCOMs. Furthermore, the saponins may be formulated together with a polyoxyethylene ether or ester, in either a non-particulate solution or suspension, or in a particulate structure such as a paucilamelar liposome or ISCOM. The saponins may also be formulated with excipients such as Carbopol^{R} to increase viscosity, or may be formulated in a dry powder form with a powder excipient such as lactose.

[0241] In one preferred embodiment, the adjuvant system includes the combination of a monophosphoryl lipid A and a saponin derivative, such as the combination of QS21 and 3D-MPL® adjuvant, as described in WO 94/00153, or a less reactogenic composition where the QS21 is quenched with cholesterol, as described in WO 96/33739. Other preferred formulations comprise an oil-in-water emulsion and tocopherol. Another particularly preferred adjuvant formulation employing QS21, 3D-MPL® adjuvant and tocopherol in an oil-in-water emulsion is described in WO 95/17210.

[0242] Another enhanced adjuvant system involves the combination of a CpG-containing oligonucleotide and a saponin derivative particularly the combination of CpG and QS21 is disclosed in WO 00/09159. Preferably the formulation additionally comprises an oil in water emulsion and tocopherol.

[0243] Additional illustrative adjuvants for use in the pharmaceutical compositions of the invention include Montanide ISA 720 (Seppic, France), SAF (Chiron, Calif., United States), ISCOMS (CSL), MF-59 (Chiron), the SBAS series of adjuvants (e.g., SBAS-2 or SBAS-4, available from SmithKline Beecham, Rixensart, Belgium), Detox (Enhanzyn®) (Corixa, Hamilton, Mont.), RC-529 (Corixa, Hamilton, Mont.) and other aminoalkyl glucosaminide 4-phosphates (AGPs), such as those described in pending U.S. patent application Ser. Nos. 08/853,826 and 09/074,720, the disclosures of which are incorporated herein by reference in their entireties, and polyoxyethylene ether adjuvants such as those described in WO 99/52549A1.

[0244] Other preferred adjuvants include adjuvant molecules of the general formula

HO(CH₂CH₂O)ₙ—A—R, (I):

[0245] wherein, n is 1-50, A is a bond or —C(O)—, R is C₁₋₅₀ alkyl or Phenyl C₁₋₅₀ alkyl.

[0246] One embodiment of the present invention consists of a vaccine formulation comprising a polyoxyethylene ether of general formula (I), wherein n is between 1 and 50, preferably 4-24, most preferably 9; the R component is C₁₋₅₀, preferably C₄-C₂₀ alkyl and most preferably C₁₂ alkyl, and A is a bond. The concentration of the polyoxyethylene ethers should be in the range 0.1-20%, preferably from 0.1-10%, and most preferably in the range 0.1-1%. Preferred polyoxyethylene ethers are selected from the following group: polyoxyethylene-9-lauryl ether, polyoxyethylene-9-steoryl ether, polyoxyethylene-8-steoryl ether, polyoxyethylene-4-lauryl ether, polyoxyethylene-35-lauryl ether, and polyoxyethylene-23-lauryl ether. Polyoxyethylene ethers such as polyoxyethylene lauryl ether are described in the Merck index (12^{th} edition: entry 7717). These adjuvant molecules are described in WO 99/52549.

[0247] The polyoxyethylene ether according to the general formula (I) above may, if desired, be combined with another adjuvant. For example, a preferred adjuvant combination is preferably with CpG as described in the pending UK patent application GB 9820956.2.

[0248] According to another embodiment of this invention, an immunogenic composition described herein is delivered to a host via antigen presenting cells (APCs), such as dendritic cells, macrophages, B cells, monocytes and other cells that may be engineered to be efficient APCs. Such cells may, but need not, be genetically modified to increase the capacity for presenting the antigen, to improve activation and/or maintenance of the T cell response, to have anti-tumor effects per se and/or to be immunologically compatible with the receiver (i.e., matched HLA haplotype). APCs may generally be isolated from any of a variety of biological fluids and organs, including tumor and peritumoral tissues, and may be autologous, allogeneic, syngeneic or xenogeneic cells.

[0249] Certain preferred embodiments of the present invention use dendritic cells or progenitors thereof as antigen-presenting cells. Dendritic cells are highly potent APCs (Banchereau and Steinman, Nature 392:245-251, 1998) and have been shown to be effective as a physiological adjuvant for eliciting prophylactic or therapeutic antitumor immunity (see Timmerman and Levy, Ann. Rev. Med. 50:507-529, 1999). In general, dendritic cells may be identified based on their typical shape (stellate in situ, with marked cytoplasmic processes (dendrites) visible in vitro), their ability to take up, process and present antigens with high efficiency and their ability to activate naïve T cell responses. Dendritic cells may, of course, be engineered to express specific cell-surface receptors or ligands that are not commonly found on dendritic cells in vivo or ex vivo, and such modified dendritic cells are contemplated by the present invention. As an alternative to dendritic cells, secreted vesicles antigen-loaded dendritic cells (called exosomes) may be used within a vaccine (see Zitvogel et al., Nature Med. 4:594-600, 1998).

[0250] Dendritic cells and progenitors may be obtained from peripheral blood, bone marrow, tumor-infiltrating cells, peritumoral tissues-infiltrating cells, lymph nodes, spleen, skin, umbilical cord blood or any other suitable tissue or fluid. For example, dendritic cells may be differentiated ex vivo by adding a combination of cytokines such as GM-CSF, IL-4, IL-13 and/or TNFα to cultures of monocytes harvested from peripheral blood. Alternatively, CD34 positive cells harvested from peripheral blood, umbilical cord blood or bone marrow may be differentiated into dendritic cells by adding to the culture medium combinations of GM-CSF, IL-3, TNFα, CD40 ligand, LPS, flt3 ligand and/or other compound(s) that induce differentiation, maturation and proliferation of dendritic cells.

[0251] Dendritic cells are conveniently categorized as “immature” and “mature” cells, which allows a simple way to discriminate between two well characterized phenotypes. However, this nomenclature should not be construed to exclude all possible intermediate stages of differentiation. Immature dendritic cells are characterized as APC with a high capacity for antigen uptake and processing, which correlates with the high expression of Fcγ receptor and mannose receptor. The mature phenotype is typically characterized by a lower expression of these markers, but a high expression of cell surface molecules responsible for T cell activation such as class I and class II MHC, adhesion molecules (e.g., CD54 and CD11) and costimulatory molecules (e.g., CD40, CD80, CD86 and 4-1 BB).

[0252] APCs may generally be transfected with a polynucleotide of the invention (or portion or other variant thereof such that the encoded polypeptide, or an immunogenic portion thereof, is expressed on the cell surface. Such transfection may take place ex vivo, and a pharmaceutical composition comprising such transfected cells may then be used for therapeutic purposes, as described herein. Alternatively, a gene delivery vehicle that targets a dendritic or other antigen presenting cell may be administered to a patient, resulting in transfection that occurs in vivo. In vivo and ex vivo transfection of dendritic cells, for example, may generally be performed using any methods known in the art, such as those described in WO 97/24447, or the gene gun approach described by Mahvi et al., Immunology and cell Biology 75:456-460, 1997. Antigen loading of dendritic cells may be achieved by incubating dendritic cells or progenitor cells with the tumor polypeptide, DNA (naked or within a plasmid vector) or RNA; or with antigen-expressing recombinant bacterium or viruses (e.g., vaccinia, fowlpox, adenovirus or lentivirus vectors). Prior to loading, the polypeptide may be covalently conjugated to an immunological partner that provides T cell help (e.g., a carrier molecule). Alternatively, a dendritic cell may be pulsed with a non-conjugated immunological partner, separately or in the presence of the polypeptide.

[0253] While any suitable carrier known to those of ordinary skill in the art may be employed in the pharmaceutical compositions of this invention, the type of carrier will typically vary depending on the mode of administration. Compositions of the present invention may be formulated for any appropriate manner of administration, including for example, topical, oral, nasal, mucosal, intravenous, intracranial, intraperitoneal, subcutaneous and intramuscular administration.

[0254] Carriers for use within such pharmaceutical compositions are biocompatible, and may also be biodegradable. In certain embodiments, the formulation preferably provides a relatively constant level of active component release. In other embodiments, however, a more rapid rate of release immediately upon administration may be desired. The formulation of such compositions is well within the level of ordinary skill in the art using known techniques. Illustrative carriers useful in this regard include microparticles of poly(lactide-co-glycolide), polyacrylate, latex, starch, cellulose, dextran and the like. Other illustrative delayed-release carriers include supramolecular biovectors, which comprise a non-liquid hydrophilic core (e.g., a cross-linked polysaccharide or oligosaccharide) and, optionally, an external layer comprising an amphiphilic compound, such as a phospholipid (see e.g., U.S. Pat. No. 5,151,254 and PCT applications WO 94/20078, WO/94/23701 and WO 96/06638). The amount of active compound contained within a sustained release formulation depends upon the site of implantation, the rate and expected duration of release and the nature of the condition to be treated or prevented.

[0255] In another illustrative embodiment, biodegradable microspheres (e.g., polylactate polyglycolate) are employed as carriers for the compositions of this invention. Suitable biodegradable microspheres are disclosed, for example, in U.S. Pat. Nos. 4,897,268; 5,075,109; 5,928,647; 5,811,128; 5,820,883; 5,853,763; 5,814,344, 5,407,609 and 5,942,252. Modified hepatitis B core protein carrier systems, such as described in WO/99 40934, and references cited therein, will also be useful for many applications. Another illustrative carrier/delivery system employs a carrier comprising particulate-protein complexes, such as those described in U.S. Pat. No. 5,928,647, which are capable of inducing a class I-restricted cytotoxic T lymphocyte responses in a host.

[0256] In another illustrative embodiment, calcium phosphate core particles are employed as carriers, vaccine adjuvants, or as controlled release matrices for the compositions of this invention. Exemplary calcium phosphate particles are disclosed, for example, in published patent application No. WO/0046147.

[0257] The pharmaceutical compositions of the invention will often further comprise one or more buffers (e.g., neutral buffered saline or phosphate buffered saline), carbohydrates (e.g., glucose, mannose, sucrose or dextrans), mannitol, proteins, polypeptides or amino acids such as glycine, antioxidants, bacteriostats, chelating agents such as EDTA or glutathione, adjuvants (e.g., aluminum hydroxide), solutes that render the formulation isotonic, hypotonic or weakly hypertonic with the blood of a recipient, suspending agents, thickening agents and/or preservatives. Alternatively, compositions of the present invention may be formulated as a lyophilizate.

[0258] The pharmaceutical compositions described herein may be presented in unit-dose or multi-dose containers, such as sealed ampoules or vials. Such containers are typically sealed in such a way to preserve the sterility and stability of the formulation until use. In general, formulations may be stored as suspensions, solutions or emulsions in oily or aqueous vehicles. Alternatively, a pharmaceutical composition may be stored in a freeze-dried condition requiring only the addition of a sterile liquid carrier immediately prior to use.

[0259] The development of suitable dosing and treatment regimens for using the particular compositions described herein in a variety of treatment regimens, including e.g., oral, parenteral, intravenous, intranasal, and intramuscular administration and formulation, is well known in the art, some of which are briefly discussed below for general purposes of illustration.

[0260] In certain applications, the pharmaceutical compositions disclosed herein may be delivered via oral administration to an animal. As such, these compositions may be formulated with an inert diluent or with an assimilable edible carrier, or they may be enclosed in hard- or soft-shell gelatin capsule, or they may be compressed into tablets, or they may be incorporated directly with the food of the diet.

[0261] The active compounds may even be incorporated with excipients and used in the form of ingestible tablets, buccal tables, troches, capsules, elixirs, suspensions, syrups, wafers, and the like (see, for example, Mathiowitz et al., Nature Mar. 27, 1997;386(6623):410-4; Hwang et al., Crit Rev Ther Drug Carrier Syst 1998;15(3):243-84; U.S. Pat. Nos. 5,641,515; 5,580,579 and 5,792,451). Tablets, troches, pills, capsules and the like may also contain any of a variety of additional components, for example, a binder, such as gum tragacanth, acacia, cornstarch, or gelatin; excipients, such as dicalcium phosphate; a disintegrating agent, such as corn starch, potato starch, alginic acid and the like; a lubricant, such as magnesium stearate; and a sweetening agent, such as sucrose, lactose or saccharin may be added or a flavoring agent, such as peppermint, oil of wintergreen, or cherry flavoring. When the dosage unit form is a capsule, it may contain, in addition to materials of the above type, a liquid carrier. Various other materials may be present as coatings or to otherwise modify the physical form of the dosage unit. For instance, tablets, pills, or capsules may be coated with shellac, sugar, or both. Of course, any material used in preparing any dosage unit form should be pharmaceutically pure and substantially non-toxic in the amounts employed. In addition, the active compounds may be incorporated into sustained-release preparation and formulations.

[0262] Typically, these formulations will contain at least about 0.1% of the active compound or more, although the percentage of the active ingredient(s) may, of course, be varied and may conveniently be between about 1 or 2% and about 60% or 70% or more of the weight or volume of the total formulation. Naturally, the amount of active compound(s) in each therapeutically useful composition may be prepared is such a way that a suitable dosage will be obtained in any given unit dose of the compound. Factors such as solubility, bioavailability, biological half-life, route of administration, product shelf life, as well as other pharmacological considerations will be contemplated by one skilled in the art of preparing such pharmaceutical formulations, and as such, a variety of dosages and treatment regimens may be desirable.

[0263] For oral administration the compositions of the present invention may alternatively be incorporated with one or more excipients in the form of a mouthwash, dentifrice, buccal tablet, oral spray, or sublingual orally-administered formulation. Alternatively, the active ingredient may be incorporated into an oral solution such as one containing sodium borate, glycerin and potassium bicarbonate, or dispersed in a dentifrice, or added in a therapeutically-effective amount to a composition that may include water, binders, abrasives, flavoring agents, foaming agents, and humectants. Alternatively the compositions may be fashioned into a tablet or solution form that may be placed under the tongue or otherwise dissolved in the mouth.

[0264] In certain circumstances it will be desirable to deliver the pharmaceutical compositions disclosed herein parenterally, intravenously, intramuscularly, or even intraperitoneally. Such approaches are well known to the skilled artisan, some of which are further described, for example, in U.S. Pat. Nos. 5,543,158; 5,641,515 and 5,399,363. In certain embodiments, solutions of the active compounds as free base or pharmacologically acceptable salts may be prepared in water suitably mixed with a surfactant, such as hydroxypropylcellulose. Dispersions may also be prepared in glycerol, liquid polyethylene glycols, and mixtures thereof and in oils. Under ordinary conditions of storage and use, these preparations generally will contain a preservative to prevent the growth of microorganisms.

[0265] Illustrative pharmaceutical forms suitable for injectable use include sterile aqueous solutions or dispersions and sterile powders for the extemporaneous preparation of sterile injectable solutions or dispersions (for example, see U.S. Pat. No. 5,466,468). In all cases the form must be sterile and must be fluid to the extent that easy syringability exists. It must be stable under the conditions of manufacture and storage and must be preserved against the contaminating action of microorganisms, such as bacteria and fungi. The carrier can be a solvent or dispersion medium containing, for example, water, ethanol, polyol (e.g., glycerol, propylene glycol, and liquid polyethylene glycol, and the like), suitable mixtures thereof, and/or vegetable oils. Proper fluidity may be maintained, for example, by the use of a coating, such as lecithin, by the maintenance of the required particle size in the case of dispersion and/or by the use of surfactants. The prevention of the action of microorganisms can be facilitated by various antibacterial and antifungal agents, for example, parabens, chlorobutanol, phenol, sorbic acid, thimerosal, and the like. In many cases, it will be preferable to include isotonic agents, for example, sugars or sodium chloride. Prolonged absorption of the injectable compositions can be brought about by the use in the compositions of agents delaying absorption, for example, aluminum monostearate and gelatin.

[0266] In one embodiment, for parenteral administration in an aqueous solution, the solution should be suitably buffered if necessary and the liquid diluent first rendered isotonic with sufficient saline or glucose. These particular aqueous solutions are especially suitable for intravenous, intramuscular, subcutaneous and intraperitoneal administration. In this connection, a sterile aqueous medium that can be employed will be known to those of skill in the art in light of the present disclosure. For example, one dosage may be dissolved in 1 ml of isotonic NaCl solution and either added to 1000 ml of hypodermoclysis fluid or injected at the proposed site of infusion, (see for example, “Remington's Pharmaceutical Sciences” 15th Edition, pages 1035-1038 and 1570-1580). Some variation in dosage will necessarily occur depending on the condition of the subject being treated. Moreover, for human administration, preparations will of course preferably meet sterility, pyrogenicity, and the general safety and purity standards as required by FDA Office of Biologics standards.

[0267] In another embodiment of the invention, the compositions disclosed herein may be formulated in a neutral or salt form. Illustrative pharmaceutically-acceptable salts include the acid addition salts (formed with the free amino groups of the protein) and which are formed with inorganic acids such as, for example, hydrochloric or phosphoric acids, or such organic acids as acetic, oxalic, tartaric, mandelic, and the like. Salts formed with the free carboxyl groups can also be derived from inorganic bases such as, for example, sodium, potassium, ammonium, calcium, or ferric hydroxides, and such organic bases as isopropylamine, trimethylamine, histidine, procaine and the like. Upon formulation, solutions will be administered in a manner compatible with the dosage formulation and in such amount as is therapeutically effective.

[0268] The carriers can further comprise any and all solvents, dispersion media, vehicles, coatings, diluents, antibacterial and antifungal agents, isotonic and absorption delaying agents, buffers, carrier solutions, suspensions, colloids, and the like. The use of such media and agents for pharmaceutical active substances is well known in the art. Except insofar as any conventional media or agent is incompatible with the active ingredient, its use in the therapeutic compositions is contemplated. Supplementary active ingredients can also be incorporated into the compositions. The phrase “pharmaceutically-acceptable” refers to molecular entities and compositions that do not produce an allergic or similar untoward reaction when administered to a human.

[0269] In certain embodiments, the pharmaceutical compositions may be delivered by intranasal sprays, inhalation, and/or other aerosol delivery vehicles. Methods for delivering genes, nucleic acids, and peptide compositions directly to the lungs via nasal aerosol sprays has been described, e.g., in U.S. Pat. Nos. 5,756,353 and 5,804,212. Likewise, the delivery of drugs using intranasal microparticle resins (Takenaga et al., J Controlled Release Mar. 2, 1998;52(1-2):81-7) and lysophosphatidyl-glycerol compounds (U.S. Pat. No. 5,725,871) are also well-known in the pharmaceutical arts. Likewise, illustrative transmucosal drug delivery in the form of a polytetrafluoroetheylene support matrix is described in U. S. Pat. No. 5,780,045.

[0270] In certain embodiments, liposomes, nanocapsules, microparticles, lipid particles, vesicles, and the like, are used for the introduction of the compositions of the present invention into suitable host cells/organisms. In particular, the compositions of the present invention may be formulated for delivery either encapsulated in a lipid particle, a liposome, a vesicle, a nanosphere, or a nanoparticle or the like. Alternatively, compositions of the present invention can be bound, either covalently or non-covalently, to the surface of such carrier vehicles.

[0271] The formation and use of liposome and liposome-like preparations as potential drug carriers is generally known to those of skill in the art (see for example, Lasic, Trends Biotechnol Jul. 16, 1998(7):307-21; Takakura, Nippon Rinsho 1998 March;56(3):691-5; Chandran et al., Indian J Exp Biol. 1997 August;35(8):801-9; Margalit, Crit Rev Ther Drug Carrier Syst. 1995;12(2-3):233-61; U.S. Pat. Nos. 5,567,434; 5,552,157; 5,565,213; 5,738,868 and 5,795,587, each specifically incorporated herein by reference in its entirety).

[0272] Liposomes have been used successfully with a number of cell types that are normally difficult to transfect by other procedures, including T cell suspensions, primary hepatocyte cultures and PC 12 cells (Renneisen et al., J Biol Chem. Sep. 25, 1990;265(27):16337-42; Muller et al., DNA Cell Biol. Apr. 9, 1990(3):221-9). In addition, liposomes are free of the DNA length constraints that are typical of viral-based delivery systems. Liposomes have been used effectively to introduce genes, various drugs, radiotherapeutic agents, enzymes, viruses, transcription factors, allosteric effectors and the like, into a variety of cultured cell lines and animals. Furthermore, he use of liposomes does not appear to be associated with autoimmune responses or unacceptable toxicity after systemic delivery.

[0273] In certain embodiments, liposomes are formed from phospholipids that are dispersed in an aqueous medium and spontaneously form multilamellar concentric bilayer vesicles (also termed multilamellar vesicles (MLVs).

[0274] Alternatively, in other embodiments, the invention provides for pharmaceutically-acceptable nanocapsule formulations of the compositions of the present invention. Nanocapsules can generally entrap compounds in a stable and reproducible way (see, for example, Quintanar-Guerrero et al., Drug Dev Ind Pharm. Dec. 24, 1998(12):1113-28). To avoid side effects due to intracellular polymeric overloading, such ultrafine particles (sized around 0.1 μm) may be designed using polymers able to be degraded in vivo. Such particles can be made as described, for example, by Couvreur et al., Crit Rev Ther Drug Carrier Syst. 1988;5(1):1-20; zur Muhlen et al., Eur J Pharm Biopharm. 1998 Mar;45(2):149-55; Zambaux et al. J Controlled Release. Jan. 2, 1998;50(1-3):31-40; and U. S. Pat. No. 5,145,684.

[0275] Cancer Therapeutic Methods

[0276] Immunologic approaches to cancer therapy are based on the recognition that cancer cells can often evade the body's defenses against aberrant or foreign cells and molecules, and that these defenses might be therapeutically stimulated to regain the lost ground, e.g. pgs. 623-648 in Klein, Immunology (Wiley-lnterscience, New York, 1982). Numerous recent observations that various immune effectors can directly or indirectly inhibit growth of tumors has led to renewed interest in this approach to cancer therapy, e.g. Jager, et al., Oncology 2001;60(1):1-7; Renner, et al., Ann Hematol 2000 Dec;79(12):651-9.

[0277] Four-basic cell types whose function has been associated with antitumor cell immunity and the elimination of tumor cells from the body are: i) B-lymphocytes which secrete immunoglobulins into the blood plasma for identifying and labeling the nonself invader cells; ii) monocytes which secrete the complement proteins that are responsible for lysing and processing the immunoglobulin-coated target invader cells; iii) natural killer lymphocytes having two mechanisms for the destruction of tumor cells, antibody-dependent cellular cytotoxicity and natural killing; and iv) T-lymphocytes possessing antigen-specific receptors and having the capacity to recognize a tumor cell carrying complementary marker molecules (Schreiber, H., 1989, in Fundamental Immunology (ed). W. E. Paul, pp. 923-955).

[0278] Cancer immunotherapy generally focuses on inducing humoral immune responses, cellular immune responses, or both. Moreover, it is well established that induction of CD4⁺ T helper cells is necessary in order to secondarily induce either antibodies or cytotoxic CD8⁺ T cells. Polypeptide antigens that are selective or ideally specific for cancer cells, particularly colon cancer cells, offer a powerful approach for inducing immune responses against colon cancer, and are an important aspect of the present invention.

[0279] Therefore, in further aspects of the present invention, the pharmaceutical compositions described herein may be used to stimulate an immune response against cancer, particularly for the immunotherapy of colon cancer. Within such methods, the pharmaceutical compositions described herein are administered to a patient, typically a warm-blooded animal, preferably a human. A patient may or may not be afflicted with cancer. Pharmaceutical compositions and vaccines may be administered either prior to or following surgical removal of primary tumors and/or treatment such as administration of radiotherapy or conventional chemotherapeutic drugs. As discussed above, administration of the pharmaceutical compositions may be by any suitable method, including administration by intravenous, intraperitoneal, intramuscular, subcutaneous, intranasal, intradermal, anal, vaginal, topical and oral routes.

[0280] Within certain embodiments, immunotherapy may be active immunotherapy, in which treatment relies on the in vivo stimulation of the endogenous host immune system to react against tumors with the administration of immune response-modifying agents (such as polypeptides and polynucleotides as provided herein).

[0281] Within other embodiments, immunotherapy may be passive immunotherapy, in which treatment involves the delivery of agents with established tumor-immune reactivity (such as effector cells or antibodies) that can directly or indirectly mediate antitumor effects and does not necessarily depend on an intact host immune system. Examples of effector cells include T cells as discussed above, T lymphocytes (such as CD8⁺ T lymphocytes and CD4⁺ T-helper tumor-infiltrating lymphocytes), killer cells (such as Natural Killer cells and lymphokine-activated killer cells), B cells and antigen-presenting cells (such as dendritic cells and macrophages) expressing a polypeptide provided herein. T cell receptors and antibody receptors specific for the polypeptides recited herein may be cloned, expressed and transferred into other vectors or effector cells for adoptive immunotherapy. The polypeptides provided herein may also be used to generate antibodies or anti-idiotypic antibodies (as described above and in U.S. Pat. No. 4,918,164) for passive immunotherapy.

[0282] Monoclonal antibodies may be labeled with any of a variety of labels for desired selective usages in detection, diagnostic assays or therapeutic applications (as described in U.S. Pat. Nos. 6,090,365; 6,015,542; 5,843,398; 5,595,721; and 4,708,930, hereby incorporated by reference in their entirety as if each was incorporated individually). In each case, the binding of the labelled monoclonal antibody to the determinant site of the antigen will signal detection or delivery of a particular therapeutic agent to the antigenic determinant on the non-normal cell. A further object of this invention is to provide the specific monoclonal antibody suitably labelled for achieving such desired selective usages thereof.

[0283] Effector cells may generally be obtained in sufficient quantities for adoptive immunotherapy by growth in vitro, as described herein. Culture conditions for expanding single antigen-specific effector cells to several billion in number with retention of antigen recognition in vivo are well known in the art. Such in vitro culture conditions typically use intermittent stimulation with antigen, often in the presence of cytokines (such as IL-2) and non-dividing feeder cells. As noted above, immunoreactive polypeptides as provided herein may be used to rapidly expand antigen-specific T cell cultures in order to generate a sufficient number of cells for immunotherapy. In particular, antigen-presenting cells, such as dendritic, macrophage, monocyte, fibroblast and/or B cells, may be pulsed with immunoreactive polypeptides or transfected with one or more polynucleotides using standard techniques well known in the art. For example, antigen-presenting cells can be transfected with a polynucleotide having a promoter appropriate for increasing expression in a recombinant virus or other expression system. Cultured effector cells for use in therapy must be able to grow and distribute widely, and to survive long term in vivo. Studies have shown that cultured effector cells can be induced to grow in vivo and to survive long term in substantial numbers by repeated stimulation with antigen supplemented with IL-2 (see, for example, Cheever et al., Immunological Reviews 157:177, 1997).

[0284] Alternatively, a vector expressing a polypeptide recited herein may be introduced into antigen presenting cells taken from a patient and clonally propagated ex vivo for transplant back into the same patient. Transfected cells may be reintroduced into the patient using any means known in the art, preferably in sterile form by intravenous, intracavitary, intraperitoneal or intratumor administration.

[0285] Routes and frequency of administration of the therapeutic compositions described herein, as well as dosage, will vary from individual to individual, and may be readily established using standard techniques. In general, the pharmaceutical compositions and vaccines may be administered by injection (e.g., intracutaneous, intramuscular, intravenous or subcutaneous), intranasally (e.g., by aspiration) or orally. Preferably, between 1 and 10 doses may be administered over a 52 week period. Preferably, 6 doses are administered, at intervals of 1 month, and booster vaccinations may be given periodically thereafter. Alternate protocols may be appropriate for individual patients. A suitable dose is an amount of a compound that, when administered as described above, is capable of promoting an anti-tumor immune response, and is at least 10-50% above the basal (i.e., untreated) level. Such response can be monitored by measuring the anti-tumor antibodies in a patient or by vaccine-dependent generation of cytolytic effector cells capable of killing the patient's tumor cells in vitro. Such vaccines should also be capable of causing an immune response that leads to an improved clinical outcome (e.g., more frequent remissions, complete or partial or longer disease-free survival) in vaccinated patients as compared to non-vaccinated patients. In general, for pharmaceutical compositions and vaccines comprising one or more polypeptides, the amount of each polypeptide present in a dose ranges from about 25 μg to 5 mg per kg of host. Suitable dose sizes will vary with the size of the patient, but will typically range from about 0.1 mL to about 5 mL.

[0286] In general, an appropriate dosage and treatment regimen provides the active compound(s) in an amount sufficient to provide therapeutic and/or prophylactic benefit. Such a response can be monitored by establishing an improved clinical outcome (e.g., more frequent remissions, complete or partial, or longer disease-free survival) in treated patients as compared to non-treated patients. Increases in preexisting immune responses to a tumor protein generally correlate with an improved clinical outcome. Such immune responses may generally be evaluated using standard proliferation, cytotoxicity or cytokine assays, which may be performed using samples obtained from a patient before and after treatment.

[0287] Cancer Detection and Diagnostic Compositions, Methods and Kits

[0288] In general, a cancer may be detected in a patient based on the presence of one or more colon tumor proteins and/or polynucleotides encoding such proteins in a biological sample (for example, blood, sera, sputum urine and/or tumor biopsies) obtained from the patient. In other words, such proteins may be used as markers to indicate the presence or absence of a cancer such as colon cancer. In addition, such proteins may be useful for the detection of other cancers. The binding agents provided herein generally permit detection of the level of antigen that binds to the agent in the biological sample.

[0289] Polynucleotide primers and probes may be used to detect the level of mRNA encoding a tumor protein, which is also indicative of the presence or absence of a cancer. In general, a tumor sequence should be present at a level that is at least two-fold, preferably three-fold, and more preferably five-fold or higher in tumor tissue than in normal tissue of the same type from which the tumor arose. Expression levels of a particular tumor sequence in tissue types different from that in which the tumor arose are irrelevant in certain diagnostic embodiments since the presence of tumor cells can be confirmed by observation of predetermined differential expression levels, e.g., 2-fold, 5-fold, etc, in tumor tissue to expression levels in normal tissue of the same type.

[0290] Other differential expression patterns can be utilized advantageously for diagnostic purposes. For example, in one aspect of the invention, overexpression of a tumor sequence in tumor tissue and normal tissue of the same type, but not in other normal tissue types, e.g. PBMCs, can be exploited diagnostically. In this case, the presence of metastatic tumor cells, for example in a sample taken from the circulation or some other tissue site different from that in which the tumor arose, can be identified and/or confirmed by detecting expression of the tumor sequence in the sample, for example using RT-PCR analysis. In many instances, it will be desired to enrich for tumor cells in the sample of interest, e.g., PBMCs, using cell capture or other like techniques.

[0291] There are a variety of assay formats known to those of ordinary skill in the art for using a binding agent to detect polypeptide markers in a sample. See, e.g., Harlow and Lane, Antibodies: A Laboratory Manual, Cold Spring Harbor Laboratory, 1988. In general, the presence or absence of a cancer in a patient may be determined by (a) contacting a biological sample obtained from a patient with a binding agent; (b) detecting in the sample a level of polypeptide that binds to the binding agent; and (c) comparing the level of polypeptide with a predetermined cut-off value.

[0292] In a preferred embodiment, the assay involves the use of binding agent immobilized on a solid support to bind to and remove the polypeptide from the remainder of the sample. The bound polypeptide may then be detected using a detection reagent that contains a reporter group and specifically binds to the binding agent/polypeptide complex. Such detection reagents may comprise, for example, a binding agent that specifically binds to the polypeptide or an antibody or other agent that specifically binds to the binding agent, such as an anti-immunoglobulin, protein G, protein A or a lectin. Alternatively, a competitive assay may be utilized, in which a polypeptide is labeled with a reporter group and allowed to bind to the immobilized binding agent after incubation of the binding agent with the sample. The extent to which components of the sample inhibit the binding of the labeled polypeptide to the binding agent is indicative of the reactivity of the sample with the immobilized binding agent. Suitable polypeptides for use within such assays include full length colon tumor proteins and polypeptide portions thereof to which the binding agent binds, as described above.

[0293] The solid support may be any material known to those of ordinary skill in the art to which the tumor protein may be attached. For example, the solid support may be a test well in a microtiter plate or a nitrocellulose or other suitable membrane. Alternatively, the support may be a bead or disc, such as glass, fiberglass, latex or a plastic material such as polystyrene or polyvinylchloride. The support may also be a magnetic particle or a fiber optic sensor, such as those disclosed, for example, in U.S. Pat. No. 5,359,681. The binding agent may be immobilized on the solid support using a variety of techniques known to those of skill in the art, which are amply described in the patent and scientific literature. In the context of the present invention, the term “immobilization” refers to both noncovalent association, such as adsorption, and covalent attachment (which may be a direct linkage between the agent and functional groups on the support or may be a linkage by way of a cross-linking agent). Immobilization by adsorption to a well in a microtiter plate or to a membrane is preferred. In such cases, adsorption may be achieved by contacting the binding agent, in a suitable buffer, with the solid support for a suitable amount of time. The contact time varies with temperature, but is typically between about 1 hour and about 1 day. In general, contacting a well of a plastic microtiter plate (such as polystyrene or polyvinylchloride) with an amount of binding agent ranging from about 10 ng to about 10 μg, and preferably about 100 ng to about 1 μg, is sufficient to immobilize an adequate amount of binding agent.

[0294] Covalent attachment of binding agent to a solid support may generally be achieved by first reacting the support with a bifunctional reagent that will react with both the support and a functional group, such as a hydroxyl or amino group, on the binding agent. For example, the binding agent may be covalently attached to supports having an appropriate polymer coating using benzoquinone or by condensation of an aldehyde group on the support with an amine and an active hydrogen on the binding partner (see, e.g., Pierce Immunotechnology Catalog and Handbook, 1991, at A12-A13).

[0295] In certain embodiments, the assay is a two-antibody sandwich assay. This assay may be performed by first contacting an antibody that has been immobilized on a solid support, commonly the well of a microtiter plate, with the sample, such that polypeptides within the sample are allowed to bind to the immobilized antibody. Unbound sample is then removed from the immobilized polypeptide-antibody complexes and a detection reagent (preferably a second antibody capable of binding to a different site on the polypeptide) containing a reporter group is added. The amount of detection reagent that remains bound to the solid support is then determined using a method appropriate for the specific reporter group.

[0296] More specifically, once the antibody is immobilized on the support as described above, the remaining protein binding sites on the support are typically blocked. Any suitable blocking agent known to those of ordinary skill in the art, such as bovine serum albumin or Tween 20™ (Sigma Chemical Co., St. Louis, Mo.). The immobilized antibody is then incubated with the sample, and polypeptide is allowed to bind to the antibody. The sample may be diluted with a suitable diluent, such as phosphate-buffered saline (PBS) prior to incubation. In general, an appropriate contact time (i.e., incubation time) is a period of time that is sufficient to detect the presence of polypeptide within a sample obtained from an individual with colon cancer at least about 95% of that achieved at equilibrium between bound and unbound polypeptide. Those of ordinary skill in the art will recognize that the time necessary to achieve equilibrium may be readily determined by assaying the level of binding that occurs over a period of time. At room temperature, an incubation time of about 30 minutes is generally sufficient.

[0297] Unbound sample may then be removed by washing the solid support with an appropriate buffer, such as PBS containing 0.1% Tween 20™. The second antibody, which contains a reporter group, may then be added to the solid support. Preferred reporter groups include those groups recited above.

[0298] The detection reagent is then incubated with the immobilized antibody-polypeptide complex for an amount of time sufficient to detect the bound polypeptide. An appropriate amount of time may generally be determined by assaying the level of binding that occurs over a period of time. Unbound detection reagent is then removed and bound detection reagent is detected using the reporter group. The method employed for detecting the reporter group depends upon the nature of the reporter group. For radioactive groups, scintillation counting or autoradiographic methods are generally appropriate. Spectroscopic methods may be used to detect dyes, luminescent groups and fluorescent groups. Biotin may be detected using avidin, coupled to a different reporter group (commonly a radioactive or fluorescent group or an enzyme). Enzyme reporter groups may generally be detected by the addition of substrate (generally for a specific period of time), followed by spectroscopic or other analysis of the reaction products.

[0299] To determine the presence or absence of a cancer, such as colon cancer, the signal detected from the reporter group that remains bound to the solid support is generally compared to a signal that corresponds to a predetermined cut-off value. In one preferred embodiment, the cut-off value for the detection of a cancer is the average mean signal obtained when the immobilized antibody is incubated with samples from patients without the cancer. In general, a sample generating a signal that is three standard deviations above the predetermined cut-off value is considered positive for the cancer. In an alternate preferred embodiment, the cut-off value is determined using a Receiver Operator Curve, according to the method of Sackett et al., Clinical Epidemiology: A Basic Science for Clinical Medicine, Little Brown and Co., 1985, p. 106-7. Briefly, in this embodiment, the cut-off value may be determined from a plot of pairs of true positive rates (i.e., sensitivity) and false positive rates (100%-specificity) that correspond to each possible cut-off value for the diagnostic test result. The cut-off value on the plot that is the closest to the upper left-hand corner (i.e., the value that encloses the largest area) is the most accurate cut-off value, and a sample generating a signal that is higher than the cut-off value determined by this method may be considered positive. Alternatively, the cut-off value may be shifted to the left along the plot, to minimize the false positive rate, or to the right, to minimize the false negative rate. In general, a sample generating a signal that is higher than the cut-off value determined by this method is considered positive for a cancer.

[0300] In a related embodiment, the assay is performed in a flow-through or strip test format, wherein the binding agent is immobilized on a membrane, such as nitrocellulose. In the flow-through test, polypeptides within the sample bind to the immobilized binding agent as the sample passes through the membrane. A second, labeled binding agent then binds to the binding agent-polypeptide complex as a solution containing the second binding agent flows through the membrane. The detection of bound second binding agent may then be performed as described above. In the strip test format, one end of the membrane to which binding agent is bound is immersed in a solution containing the sample. The sample migrates along the membrane through a region containing second binding agent and to the area of immobilized binding agent. Concentration of second binding agent at the area of immobilized antibody indicates the presence of a cancer. Typically, the concentration of second binding agent at that site generates a pattern, such as a line, that can be read visually. The absence of such a pattern indicates a negative result. In general, the amount of binding agent immobilized on the membrane is selected to generate a visually discernible pattern when the biological sample contains a level of polypeptide that would be sufficient to generate a positive signal in the two-antibody sandwich assay, in the format discussed above. Preferred binding agents for use in such assays are antibodies and antigen-binding fragments thereof. Preferably, the amount of antibody immobilized on the membrane ranges from about 25 ng to about 1 μg, and more preferably from about 50 ng to about 500 ng. Such tests can typically be performed with a very small amount of biological sample.

[0301] Of course, numerous other assay protocols exist that are suitable for use with the tumor proteins or binding agents of the present invention. The above descriptions are intended to be exemplary only. For example, it will be apparent to those of ordinary skill in the art that the above protocols may be readily modified to use tumor polypeptides to detect antibodies that bind to such polypeptides in a biological sample. The detection of such tumor protein specific antibodies may correlate with the presence of a cancer.

[0302] A cancer may also, or alternatively, be detected based on the presence of T cells that specifically react with a tumor protein in a biological sample. Within certain methods, a biological sample comprising CD4⁺ and/or CD8⁺ T cells isolated from a patient is incubated with a tumor polypeptide, a polynucleotide encoding such a polypeptide and/or an APC that expresses at least an immunogenic portion of such a polypeptide, and the presence or absence of specific activation of the T cells is detected. Suitable biological samples include, but are not limited to, isolated T cells. For example, T cells may be isolated from a patient by routine techniques (such as by Ficoll/Hypaque density gradient centrifugation of peripheral blood lymphocytes). T cells may be incubated in vitro for 2-9 days (typically 4 days) at 37° C. with polypeptide (e.g., 5-25 μg/ml). It may be desirable to incubate another aliquot of a T cell sample in the absence of tumor polypeptide to serve as a control. For CD4⁺ T cells, activation is preferably detected by evaluating proliferation of the T cells. For CD8⁺ T cells, activation is preferably detected by evaluating cytolytic activity. A level of proliferation that is at least two fold greater and/or a level of cytolytic activity that is at least 20% greater than in disease-free patients indicates the presence of a cancer in the patient.

[0303] As noted above, a cancer may also, or alternatively, be detected based on the level of mRNA encoding a tumor protein in a biological sample. For example, at least two oligonucleotide primers may be employed in a polymerase chain reaction (PCR) based assay to amplify a portion of a tumor cDNA derived from a biological sample, wherein at least one of the oligonucleotide primers is specific for (i.e., hybridizes to) a polynucleotide encoding the tumor protein. The amplified cDNA is then separated and detected using techniques well known in the art, such as gel electrophoresis.

[0304] Similarly, oligonucleotide probes that specifically hybridize to a polynucleotide encoding a tumor protein may be used in a hybridization assay to detect the presence of polynucleotide encoding the tumor protein in a biological sample.

[0305] To permit hybridization under assay conditions, oligonucleotide primers and probes should comprise an oligonucleotide sequence that has at least about 60%, preferably at least about 75% and more preferably at least about 90%, identity to a portion of a polynucleotide encoding a tumor protein of the invention that is at least 10 nucleotides, and preferably at least 20 nucleotides, in length. Preferably, oligonucleotide primers and/or probes hybridize to a polynucleotide encoding a polypeptide described herein under moderately stringent conditions, as defined above. Oligonucleotide primers and/or probes which may be usefully employed in the diagnostic methods described herein preferably are at least 10-40 nucleotides in length. In a preferred embodiment, the oligonucleotide primers comprise at least 10 contiguous nucleotides, more preferably at least 15 contiguous nucleotides, of a DNA molecule having a sequence as disclosed herein. Techniques for both PCR based assays and hybridization assays are well known in the art (see, for example, Mullis et al., Cold Spring Harbor Symp. Quant. Biol., 51:263, 1987; Erlich ed., PCR Technology, Stockton Press, NY, 1989).

[0306] One preferred assay employs RT-PCR, in which PCR is applied in conjunction with reverse transcription. Typically, RNA is extracted from a biological sample, such as biopsy tissue, and is reverse transcribed to produce cDNA molecules. PCR amplification using at least one specific primer generates a cDNA molecule, which may be separated and visualized using, for example, gel electrophoresis. Amplification may be performed on biological samples taken from a test patient and from an individual who is not afflicted with a cancer. The amplification reaction may be performed on several dilutions of cDNA spanning two orders of magnitude. A two-fold or greater increase in expression in several dilutions of the test patient sample as compared to the same dilutions of the non-cancerous sample is typically considered positive.

[0307] In another aspect of the present invention, cell capture technologies may be used in conjunction, with, for example, real-time PCR to provide a more sensitive tool for detection of metastatic cells expressing colon tumor antigens. Detection of colon cancer cells in biological samples, e.g., bone marrow samples, peripheral blood, and small needle aspiration samples is desirable for diagnosis and prognosis in colon cancer patients.

[0308] Immunomagnetic beads coated with specific monoclonal antibodies to surface cell markers, or tetrameric antibody complexes, may be used to first enrich or positively select cancer cells in a sample. Various commercially available kits may be used, including Dynabeads® Epithelial Enrich (Dynal Biotech, Oslo, Norway), StemSep™ (StemCell Technologies, Inc., Vancouver, BC), and RosetteSep (StemCell Technologies). A skilled artisan will recognize that other methodologies and kits may also be used to enrich or positively select desired cell populations. Dynabeads® Epithelial Enrich contains magnetic beads coated with mAbs specific for two glycoprotein membrane antigens expressed on normal and neoplastic epithelial tissues. The coated beads may be added to a sample and the sample then applied to a magnet, thereby capturing the cells bound to the beads. The unwanted cells are washed away and the magnetically isolated cells eluted from the beads and used in further analyses.

[0309] RosetteSep can be used to enrich cells directly from a blood sample and consists of a cocktail of tetrameric antibodies that targets a variety of unwanted cells and crosslinks them to glycophorin A on red blood cells (RBC) present in the sample, forming rosettes. When centrifuged over Ficoll, targeted cells pellet along with the free RBC. The combination of antibodies in the depletion cocktail determines which cells will be removed and consequently which cells will be recovered. Antibodies that are available include, but are not limited to: CD2, CD3, CD4, CD5, CD8, CD10, CD11b, CD14, CD15, CD16, CD19, CD20, CD24, CD25, CD29, CD33, CD34, CD36, CD38, CD41, CD45, CD45RA, CD45RO, CD56, CD66B, CD66e, HLA-DR, IgE, and TCRαβ.

[0310] Additionally, it is contemplated in the present invention that mAbs specific for colon tumor antigens can be generated and used in a similar manner. For example, mAbs that bind to tumor-specific cell surface antigens may be conjugated to magnetic beads, or formulated in a tetrameric antibody complex, and used to enrich or positively select metastatic colon tumor cells from a sample. Once a sample is enriched or positively selected, cells may be lysed and RNA isolated. RNA may then be subjected to RT-PCR analysis using colon tumor-specific primers in a real-time PCR assay as described herein. One skilled in the art will recognize that enriched or selected populations of cells may be analyzed by other methods (e.g. in situ hybridization or flow cytometry).

[0311] In another embodiment, the compositions described herein may be used as markers for the progression of cancer. In this embodiment, assays as described above for the diagnosis of a cancer may be performed over time, and the change in the level of reactive polypeptide(s) or polynucleotide(s) evaluated. For example, the assays may be performed every 24-72 hours for a period of 6 months to 1 year, and thereafter performed as needed. In general, a cancer is progressing in those patients in whom the level of polypeptide or polynucleotide detected increases over time. In contrast, the cancer is not progressing when the level of reactive polypeptide or polynucleotide either remains constant or decreases with time.

[0312] Certain in vivo diagnostic assays may be performed directly on a tumor. One such assay involves contacting tumor cells with a binding agent. The bound binding agent may then be detected directly or indirectly via a reporter group. Such binding agents may also be used in histological applications. Alternatively, polynucleotide probes may be used within such applications.

[0313] As noted above, to improve sensitivity, multiple tumor protein markers may be assayed within a given sample. It will be apparent that binding agents specific for different proteins provided herein may be combined within a single assay. Further, multiple primers or probes may be used concurrently. The selection of tumor protein markers may be based on routine experiments to determine combinations that results in optimal sensitivity. In addition, or alternatively, assays for tumor proteins provided herein may be combined with assays for other known tumor antigens.

[0314] The present invention further provides kits for use within any of the above diagnostic methods. Such kits typically comprise two or more components necessary for performing a diagnostic assay. Components may be compounds, reagents, containers and/or equipment. For example, one container within a kit may contain a monoclonal antibody or fragment thereof that specifically binds to a tumor protein. Such antibodies or fragments may be provided attached to a support material, as described above. One or more additional containers may enclose elements, such as reagents or buffers, to be used in the assay. Such kits may also, or alternatively, contain a detection reagent as described above that contains a reporter group suitable for direct or indirect detection of antibody binding.

[0315] Alternatively, a kit may be designed to detect the level of mRNA encoding a tumor protein in a biological sample. Such kits generally comprise at least one oligonucleotide probe or primer, as described above, that hybridizes to a polynucleotide encoding a tumor protein. Such an oligonucleotide may be used, for example, within a PCR or hybridization assay. Additional components that may be present within such kits include a second oligonucleotide and/or a diagnostic reagent or container to facilitate the detection of a polynucleotide encoding a tumor protein.

[0316] The following Examples are offered by way of illustration and not by way of limitation.

### EXAMPLES

### Example 1

### Identification of Colon Tumor Protein Cdnas

[0317] This Example illustrates the identification of cDNA molecules encoding colon tumor proteins using PCR-based cDNA subtraction methodology.

[0318] A modification of the Clontech (Palo Alto, Calif.) PCR-Select™ cDNA subtraction methodology was employed to obtain cDNA populations enriched in cDNAs derived from transcripts that are differentially expressed in colon tumor samples. By this methodology, mRNA populations were isolated from colon tumor and metastatic tumor samples (“tester” mRNA) as well as from normal tissues, such as brain, pancreas, bone marrow, liver, heart, lung, stomach and small intestine (“driver” mRNA). From the tester and driver mRNA populations, cDNA was synthesized by standard methodology. See, e.g., Ausubel, F. M. et al., Short Protocols in Molecular Biology (4^{th} ed., John Wiley and Sons, Inc., 1999).

[0319] The subtraction steps were performed using a PCR-based protocol that was modified to generate fragments larger than would be derived by the Clontech methodology. By this modified protocol, the tester and driver cDNAs were separately digested with five restriction endonucleases (Mlu I, Msc I, Pvu II, Sal I and Stu I) each of which recognize a unique 6-base pair nucleotide sequence. This digestion resulted in an average cDNA size of 600 bp, rather than the average size of 300 bp that results from digestion with Rsa I according to the Clontech methodology. This modification did not affect the ultimate subtraction efficiency.

[0320] Following the restriction digestion, adapter oligonucleotides having unique nucleotide sequences were ligated onto the 5′ ends of the tester cDNAs; adapter oligonucleotides were not ligated onto the driver cDNAs. The tester and driver cDNAs were subsequently hybridized one to the other using an excess of driver cDNA. This hybridization step resulted in populations of (a) unhybridized tester cDNAs, (b) tester cDNAs hybridized to other tester cDNAs, (c) tester cDNAs hybridized to driver cDNAs, (d) unhybridized driver cDNAs and (e) driver cDNAs hybridized to driver cDNAs.

[0321] Tester cDNAs hybridized to other tester cDNAs were selectively amplified by a polymerase chain reaction (PCR) employing primers complementary to the ligated adapters. Because only tester cDNAs were ligated to adapter sequences, neither unhybridized tester or driver cDNAs, tester cDNAs hybridized to driver cDNAs nor driver cDNAs hybridized to driver cDNAs were amplified using adapter specific oligonucleotides. The PCR amplified tester cDNAs were cloned into the pCR2.1 plasmid vector (Invitrogen; Carlsbad, Calif.) to create libraries enriched in differentially expressed colon tumor antigen and colon metastatic tumor antigen specific cDNAs.

[0322] Three thousand clones from the pCR2.1 tumor antigen cDNA libraries were randomly selected and used to obtain clones for microarray analysis and nucleotide sequencing. The cDNA insert from each pCR2.1 clone was PCR amplified as follows. Briefly, 0.5 μl of glycerol stock solution was added to 99.5 μl of PCR mix containing 80 μl H₂O, 10 μl 10×PCR Buffer, 6 μl MgCl₂, 1 μl 10 mM dNTPs, 1 μl 100 mM M13 forward primer (CACGACGTTGTAAAACGACGG; SEQ ID NO:2236), 1 μl 100 mM M13 reverse primer (CACAGGAAACAGCTATGACC; SEQ ID NO:2237), and 0.5 μl 5 u/ml Taq DNA polymerase. The M13 forward and reverse primers used herein were obtained from Operon Technologies (Alameda, Calif.). The PCR amplification was performed for thirty cycles under the following conditions: 95° C. for 5 minutes, 92° C. for 30 seconds, 57° C. for 40 seconds, 75° C. for 2 minutes and 75° C. for 5 minutes.

[0323] mRNA expression levels for representative clones were determined using microarray technology in colon tumor tissues (n=25), normal colon tissues (n=6), kidney, lung, liver, brain, heart, esophagus, small intestine, stomach, pancreas, adrenal gland, salivary gland, resting PBMC, activated PBMC, bone marrow, dendritic cells, spinal cord, blood vessels, skeletal muscle, skin, breast and fetal tissues. An exemplary methodology for performing the microarray analysis is described in Schena et al., Science 270:467-470. The number of tissue samples tested in each case was one (n=1), except where specifically noted above; additionally, all the above-mentioned tissues were derived from humans.

[0324] The PCR amplification products were dotted onto slides in an array format, with each product occupying a unique location in the array. mRNA was extracted from the tissue sample to be tested, and fluorescent-labeled cDNA probes were generated by reverse transcription, according to standard methodology, in the presence of fluorescent nucleotides ψ5 and ψ3. See, e.g., Ausubel, et al., supra for exemplary reaction conditions for performing the reverse transcription reaction; ψ5 and ψ3 fluorescent labeled nucleotides may be obtained, e.g., from Amersham Pharmacia (Uppsala, Sweden) or NEN® Life Science Products, Inc. (Boston, Mass.). The microarrays were probed with the fluorescent-labeled cDNAs, the slides were scanned and fluorescence intensity was measured. Genetic MicroSystems instrumentation for preparing the cDNA microarrays and for measuring fluorescence intensity is available from Affymetrix (Santa Clara, Calif.).

[0325] An elevated fluorescence intensity in a microarray sector probed with cDNA probes obtained from a colon tumor or colon metastatic tumor tissue as compared to the fluorescence intensity in the same sector probed with cDNA probes obtained from a normal tissue indicates a tumor antigen gene that is differentially expressed in colon tumor or colon metastatic tumor tissue.

[0326] Clones disclosed herein as SEQ ID NO:1-2231 were identified from the PCR subtracted differential colon tumor and colon metastatic tumor cDNA libraries and showed at least two-fold overexpression in colon tumors by the microarray based methodology.

### Example 2

### Full-Length Sequence of C931P Colon Tumor Protein cDNA

[0327] This example discloses the full-length sequence of the C931P colon tumor protein cDNA by LifeSeq Gold Datamining.

[0328] The original sequence for C931P (disclosed herein as SEQ ID NO:1861) was used as a query sequence in a BlastN search of the LifeSeq Gold database (December 2000 release). C931P matched a single LifeSeq Gold gene bin (#475113) that contained 5 template sequences. The 5 template sequences were aligned with C931P in order to determine a consensus, full-length cDNA sequence for C931P that encodes a 371 amino acid ORF (SEQ ID NO:2232 and 2235, respectively). Multiple splice variants were discovered in the LifeSeq Gold database. Two of these splice variants are disclosed herein, one of which encodes the 371 amino acid open reading frame.

[0329] The original clone isolated for C931P (443 bp) was used as a query sequence in a BlastN search of the LifeSeq Gold “LGtemplates Sep2000” search database. This search was done using the LifeSeq gold Web interface provided by Incyte. There was an identical match to a single LifeSeq Gold template sequence, number 475113.7. Then, information regarding gene bin 475113 (to which the 475113.7 sequence belongs) was obtained from the LifeSeq Gold database. This 475113 gene bin consisted of 5 template sequences and 176 clones. The 5 template sequences were aligned with the C931P sequence using the DNAStar Seqman program. Alignment of these sequences showed that each of the 5 template sequences represented an alternative splice form—each sequence had a unique multiple base pair deletion relative to the other sequences. This multiple sequence alignment was used to derive a single sequence that should represent the mature mRNA for the C931P gene, as well as a single open reading frame. This predicted mature mRNA sequence was obtained by incorporating all multiple base pair deletions that were present in the 5 template sequences. The C931P original isolate sequence corresponds to a portion of the gene that is deleted in the predicted fully processed mRNA sequence. Thus, herein 3 sequences obtained from LifeSeq are disclosed. One corresponds to a predicted partially spliced form of the gene (SEQ ID NO:2233) that will align with the C931P original isolate sequence. The second corresponds to the predicted, fully processed mRNA sequence (SEQ ID NO:2232) that will not align with the C931P original isolate sequence. The third sequence corresponds to the predicted coding portion of the sequence only (SEQ ID NO:2234). A single protein sequence is disclosed herein—the predicted C931P full-length protein sequence (SEQ ID NO:2235).

### Example 3

### MRNA Expression Analysis of the C931P Colon Tumor Antigen Using Real-Time Pcr

[0330] The colon tumor candidate gene C931P (full length cDNA set forth in SEQ ID NO:2232) was analyzed by real-time PCR, as described below, using the short and extended colon panel. This gene was found to have increased expression in about 50% of colon tumors. Some expression was also observed in lymph nodes and thymus.

[0331] The first-strand cDNA to be used in the quantitative real-time PCR was synthesized from 20 μg of total RNA that had been treated with DNase I (Amplification Grade, Gibco BRL Life Technology, Gaitherburg, Md.), using Superscript Reverse Transcriptase (RT) (Gibco BRL Life Technology, Gaitherburg, Md.). Real-time PCR was performed with a GeneAmp™5700 sequence detection system (PE Biosystems, Foster City, Calif.). The 5700 system uses SYBR™ green, a fluorescent dye that only intercalates into double stranded DNA, and a set of gene-specific forward and reverse primers. The increase in fluorescence is monitored during the whole amplification process. The optimal concentration of primers was determined using a checkerboard approach and a pool of cDNAs from breast tumors was used in this process.

[0332] The PCR reaction was performed in 25 μl volumes that include 2.5 μl of SYBR green buffer, 2 μl of cDNA template and 2.5 μl each of the forward and reverse primers for the gene of interest. The cDNAs used for RT reactions were diluted 1:10 for each gene of interest and 1:100 for the β-actin control. In order to quantitate the amount of specific cDNA (and hence initial mRNA) in the sample, a standard curve is generated for each run using the plasmid DNA containing the gene of interest. Standard curves were generated using the Ct values determined in the real-time PCR which were related to the initial cDNA concentration used in the assay. Standard dilution ranging from 20-2×10⁶ copies of the gene of interest was used for this purpose. In addition, a standard curve was generated for β-actin ranging from 200 fg-2000 fg. This enabled standardization of the initial RNA content of a tissue sample to the amount of β-actin for comparison purposes. The mean copy number for each group of tissues tested was normalized to a constant amount of β-actin, allowing the evaluation of the over-expression levels seen with each of the genes.

### Example4

### Bioinformatic and Extended Real-Time Pcr Analysis of C931P

[0333] The colon tumor antigen, C931P (SEQ ID NOs:1861, 2232, 2234, and 2235 and 2239)), was further analyzed by real-time PCR as described in Example 3, and using bioinformatics. Real-time PCR expression profiling on an extended panel of samples showed that this gene is overexpressed by at least two-fold in the majority of colon tumor samples tested as compared to normal colon samples. Overexpression was also seen in normal thymus. Lower levels of expression were observed in esophagus and small intestine. No expression was observed in other normal tissues. A search of the sequence against Genbank showed that C931P has similarity to 2 cDNA clones including a potential c-Myc target JPO1 gene.

### Example 5

### Expression in E. Coli of Recombinant C931P

[0334] The colon tumor antigen, C931P (full-length cDNA of the coding region and predicted protein sequence set forth in SEQ ID NOs:2234 and 2235 and 2239, respectively) was cloned into the pET28b expression vector as described in detail below. The sequence of the resulting construct is set forth in SEQ ID NO:2238 and the predicted amino acid sequence is set forth in SEQ ID NO:2239. The recombinant protein was then expressed in E. coli as described below.

[0335] The plasmid C931P/pCR4-TOPO was digested with Nde I and Not I. The insert C931P was purified and then ligated into the His Tag containing pET28b vector, which was linearized with the same two restriction enzymes and dephosphorylated. The ligation mixture was transformed into competent E. coli cells with the following standard protocol: thaw the competent E. coli cells (25 μl) on ice, add DNA (or ligation mixture), mix and let sit on ice for 5 min. The E. coli cells were then heat-shocked at 42° C. for 30 seconds, and put back on ice for 2 minutes. 100 μl of SOC was added to the E. coli and was grown at 37° C. for 1 hour. The culture was then plated on LB (+Kan) and grown overnight at 37° C. The following day, several colonies were randomly picked for plasmid miniprep. The plasmids were screened by restriction enzyme analysis and further confirmed by DNA sequencing. All 5 clones (Clone ID Nos: 90796-90780) were confirmed by DNA sequence.

[0336] In order to determine the optimal protein expression conditions, the expression construct was transformed into different hosts, then mini-induction screening was done by varying temperature, culture media, and/or IPTG concentrations after the inducer IPTG was added to the mid-log phase culture. Then the recombinant protein expression was screened by SDS-PAGE and/or Western blot analysis. The optimal conditions for expression of C931P were as follows: 100 ml 2×YS (+Kan+Cam) was inoculated from glycerol stock of C931P in Tuner (DE3)pLysS host cells and grown overnight at 37° C. The following day, the culture was diluted 25 ml overnight culture into 1 liter of new media. This was grown at 37° C. until the OD was 0.6-0.8. An aliquot was removed for T0 time point sample, the IPTG was added at 1 mM concentration and the culture grown for an additional 3 hours at 37° C. Cells were pelleted and stored at −70° C. until purification. Western analysis with an anti Histag antibody confirmed production of C931P. Both Coomassie staining of the SDS PAGE gel and Western analysis confirmed production of the C931P.

[0337] C931P has a predicted Molecular Weight of 44735.57 Daltons, 391 Amino Acids, 71 Strongly Basic (+) Amino Acids (K, R), 48 Strongly Acidic (−) Amino Acids (D, E), 87 Hydrophobic Amino Acids (A, I, L, F, W, V), 116 Polar Amino Acids (N, C, Q, S, T, Y), an isolectric point of 9.530 , and a charge of 24.802 at PH 7.0.

### Example 6

### Transient Expression of Recombinant C931P in Mammalian Cells

[0338] The colon tumor antigen, C931P (full-length cDNA of the coding region and predicted protein sequence set forth in SEQ ID NOs:2234 and 2235 and 2239, respectively) was cloned into the mammalian expression vector pCEP4 both with and without a Flag tag as described in detail below. The sequences of the resulting constructs with and without the Flag tag are set forth in SEQ ID NOs:2241 and 2240, respectively. The recombinant protein was then expressed in HEK293 cells as described below.

[0339] C931P-FLAG/pCEP4 was transfected into HEK293 cells (ATCC) using Fugene6 reagent (Roche). Briefly, the HEK cells were plated at a density of 150,000 cells/ml in DMEM (Gibco) containing 10% FBS (Hyclone) and grown overnight. The following day, 3 μl of Fugene6 was added to 97 μl of DMEM containing no FBS and incubated for 5 minutes at room temperature. The Fugene6/DMEM mixture was then added to 100 μl DMEM containing 2 μg of C931P-FLAG/pCEP4 plasmid DNA and incubated for 15 minutes at room temperature. The Fugene/DNA mix was then added to the HEK293 cells and incubated for 48-72 hrs at 37° C. with 7% CO₂. Cells were resuspended and pelleted by centrifugation.

[0340] For Western blot analysis, whole cell lysates were generated by adding 200ul of 1×NuPAGE sample buffer containing 1% β-mercaptoethanol and sonicated for approximately 10 seconds. Prior to loading samples on a SDS-PAGE gel, the samples were heated at 70° C. for 5 minutes. Protein was transferred to nitrocellulose and probed using an anti-FLAG mouse monoclonal antibody (Sigma, F-3165) at a dilution of 1:500. The blot was revealed with a donkey anti-mouse Ig coupled to HRP followed by incubation in ECL substrate. This analysis showed that the C931P protein was successfully expressed in the HEK293 mammalian cell line.

### Example 7

### Peptide Priming of T-helpers Lines

[0341] Generation of CD4⁺ T helper lines and identification of peptide epitopes derived from tumor-specific antigens that are capable of being recognized by CD4⁺ T cells in the context of HLA class II molecules, is carried out as follows:

[0342] Fifteen-mer peptides overlapping by 10 amino acids, derived from a tumor-specific antigen, are generated using standard procedures. Dendritic cells (DC) are derived from PBMC of a normal donor using GM-CSF and IL-4 by standard protocols. CD4⁺ T cells are generated from the same donor as the DC using MACS beads (Miltenyi Biotec, Auburn, Calif.) and negative selection. DC are pulsed overnight with pools of the 15-mer peptides, with each peptide at a final concentration of 0.25 μg/ml. Pulsed DC are washed and plated at 1×10⁴ cells/well of 96-well V-bottom plates and purified CD4⁺ T cells are added at 1×10⁵/well. Cultures are supplemented with 60 ng/ml IL-6 and 10 ng/ml IL-12 and incubated at 37° C. Cultures are restimulated as above on a weekly basis using DC generated and pulsed as above as antigen presenting cells, supplemented with 5 ng/ml IL-7 and 10 U/ml IL-2. Following 4 in vitro stimulation cycles, resulting CD4⁺ T cell lines (each line corresponding to one well) are tested for specific proliferation and cytokine production in response to the stimulating pools of peptide with an irrelevant pool of peptides used as a control.

### Example 8

### Generation of Tumor-Specific CTL Lines Using in Vitro Whole-Gene Priming

[0343] Using in vitro whole-gene priming with tumor antigen-vaccinia infected DC (see, for example, Yee et al, The Journal of Immunology, 157(9):4079-86, 1996), human CTL lines are derived that specifically recognize autologous fibroblasts transduced with a specific tumor antigen, as determined by interferon-γ ELISPOT analysis. Specifically, dendritic cells (DC) are differentiated from monocyte cultures derived from PBMC of normal human donors by growing for five days in RPMI medium containing 10% human serum, 50 ng/ml human GM-CSF and 30 ng/ml human IL-4. Following culture, DC are infected overnight with tumor antigen-recombinant vaccinia virus at a multiplicity of infection (M.O.I) of five, and matured overnight by the addition of 3 μg/ml CD40 ligand. Virus is then inactivated by UV irradiation. CD8+ T cells are isolated using a magnetic bead system, and priming cultures are initiated using standard culture techniques. Cultures are restimulated every 7-10 days using autologous primary fibroblasts retrovirally transduced with previously identified tumor antigens. Following four stimulation cycles, CD8+ T cell lines are identified that specifically produce interferon-γ when stimulated with tumor antigen-transduced autologous fibroblasts. Using a panel of HLA-mismatched B-LCL lines transduced with a vector expressing a tumor antigen, and measuring interferon-γ production by the CTL lines in an ELISPOT assay, the HLA restriction of the CTL lines is determined.

### Example 9

### Generation and Characterization of Anti-Tumor Antigen Monoclonal Antiodies

[0344] Mouse monoclonal antibodies are raised against E. coli derived tumor antigen proteins as follows: Mice are immunized with Complete Freund's Adjuvant (CFA) containing 50 μg recombinant tumor protein, followed by a subsequent intraperitoneal boost with Incomplete Freund's Adjuvant (IFA) containing 10 μg recombinant protein. Three days prior to removal of the spleens, the mice are immunized intravenously with approximately 50 μg of soluble recombinant protein. The spleen of a mouse with a positive titer to the tumor antigen is removed, and a single-cell suspension made and used for fusion to SP2/O myeloma cells to generate B cell hybridomas. The supernatants from the hybrid clones are tested by ELISA for specificity to recombinant tumor protein, and epitope mapped using peptides that spanned the entire tumor protein sequence. The mAbs are also tested by flow cytometry for their ability to detect tumor protein on the surface of cells stably transfected with the cDNA encoding the tumor protein.

### Example 10

### Synthesis of Polypeptides

[0345] This Example discloses an exemplary methodology for the preparation of colon tumor proteins.

[0346] Polypeptides may be synthesized on a Perkin Elmer/Applied Biosystems Division 430A peptide synthesizer using FMOC chemistry with HPTU (O-Benzotriazole-N,N,N′,N′-tetramethyluronium hexafluorophosphate) activation. A Gly-Cys-Gly sequence may be attached to the amino terminus of the peptide to provide a method of conjugation, binding to an immobilized surface, or labeling of the peptide. Cleavage of the peptides from the solid support may be carried out using the following cleavage mixture: trifluoroacetic acid:ethanedithiol:thioanisole:water:phenol (40:1:2:2:3). After cleaving for 2 hours, the peptides may be precipitated in cold methyl-t-butyl-ether. The peptide pellets may then be dissolved in water containing 0.1% trifluoroacetic acid (TFA) and lyophilized prior to purification by C18 reverse phase HPLC. A gradient of 0%-60% acetonitrile (containing 0.1% TFA) in water (containing 0.1% TFA) may be used to elute the peptides. Following lyophilization of the pure fractions, the peptides may be characterized using electrospray or other types of mass spectrometry and by amino acid analysis.

[0347] From the foregoing it will be appreciated that, although specific embodiments of the invention have been described herein for purposes of illustration, various modifications may be made without deviating from the spirit and scope of the invention. Accordingly, the invention is not limited except as by the appended claims.

The application's sequence listing, which the Patent Office published only in electronic form, follows.

SEQUENCE LISTING (2241 sequences)

SEQ ID NO: 1 - DNA, 579 bp, Homo sapiens
  misc_feature 454, 469, 558: n = A,T,C or G
acttcagttggtgcacaaaatactgtcatttgctcaaagctggctgccaaatgtttggtgatgaaggcagaaatgaatggctcaaaacttgggagaagagcaaaacctgaaggggccctccagaacaatgatgggctttatgatcctgactgcgatgagagcgggctctttaaggccaagcagtgcaacggcacctccatgtgctggtgtgtgaacactgctggggtcagaagaacagacaaggacactgaaataacctgctctgagcgagtgagaacctactggatcatcattgaactaaaacacaaagcaagagaaaaaccttatgatagtaaaagtttgcggactgcacttcagaaggagatcacaacgcgttatcaactggatccaaaatttatcacgagtattttgtatgagaataatgttatcactattgatctggttcaaaattctnctcaaaaaaactcanaatgatgttggacatagctgatggtggcttattatttttgaaaaagatgttaaaggtgaatccttgtttcattctagaaaatggacctnacagtaaatggggaacaactg

SEQ ID NO: 2 - DNA, 520 bp, Homo sapiens
  misc_feature 380, 487: n = A,T,C or G
acaaaccaagagcttttacagatccagaatttattagtttaaaatgcaggtgaacttttttttgcgtttggtttacttgtctgtcaaatgtttccttaaacatgaaactgaataaggagaagagtatttttaacacttaaatttcttggcaaattttaaaacattttttagtctgtaatacactccacttgaagcacttaagtcttccttaaatgacttttcttaagtaatgatactgtgtgttttcccaaagcacttttaaaaaaatttttataaattactatctgttgaaaaggtgtccttttcctttcttctagtatttttttcttaccaaaattcactaatcttgaatgtttgtgatattaaattccaaaatgcangaatacttgactcatttaaagctaaaattttgttaactgatttcaattataattgtaatggatttttttgactttgtaatggattctttttcatcaaaaaagccttnattttttttatctatgtggaaaacacaataaaa

SEQ ID NO: 3 - DNA, 177 bp, Homo sapiens
  misc_feature 9, 60, 61: n = A,T,C or G
gtactttcngaagatgaaatatttataatgagttatggaaacaatgttttagaaatgttnntcttggtgtaatttaatgcagatttttacctcaattttgttaaaaaacttgataatttgatccctccatctatttaatatttaatattttcagattctagagtatttaaaatttaa

SEQ ID NO: 4 - DNA, 223 bp, Homo sapiens
  misc_feature 18, 19, 64, 158, 167, 172, 173: n = A,T,C or G
acaggacaccaccccganntgaagggcattgcggagggcattggacctccccacccactacagntaactcaagacaacataccatgctacaaagtcaccccattaacacatcctttccaagtcaagacactgccttacaaatgaactccaagactatngaaatgatnaaaannaatcttgttcaaatatacagtatctgctattataggaaacatcagggcgt

SEQ ID NO: 5 - DNA, 414 bp, Homo sapiens
  misc_feature 387: n = A,T,C or G
actttcggaagatgaaatatttataatgagttatggaaacaatgttttagaaatgtttttcttggtgtaatttaatgcagatttttacctcgattttgttaaaaaacttgataatttgatccctccatctatttaatatttaatattttcagattctagagtatttaaaatttaaacacaattataaaattaattataattcctacttatgttagctatgatttagggccaaaactaccctggttttgtcttgcaacttgaaacattgtgtattttaaactatataatttgggaacattattttatagactgtggataaccaaatataagatttgtgatttttaatgcttcatttgtgtaaaatcatttgtatattctatttatagnatgcaatttttctagctcattaaaagt

SEQ ID NO: 6 - DNA, 408 bp, Homo sapiens
  misc_feature 367: n = A,T,C or G
acctgtcccagccacaggcttcttgtccacctcttctcccctgcccaccagctgctcagcgcataagaccttcccgacaggctctgcgtgtgcagctctctgcgtccctcctgggccctccagcgtcagacactaatgggagttcccgagatgctcgggtttgagcagggagcaggcagagctgcagtcagagacattagaaaaccagtctgaattgggtctgtctttgagatgcccaggccagcagaaagcagctcagaagtattgttgctcatggtgtggcaatggactgaactgtaatgaaaatgttatttaatctttgtctctgtattttgatacttgaatgactttcccttttgttttactncatataaaattgttaatctgtctgattttgtctgaattata

SEQ ID NO: 7 - DNA, 489 bp, Homo sapiens
  misc_feature 364: n = A,T,C or G
acaaaaataaacagacatttatttccagacttatcttttacataagttaaatacacatttgtctgaggcactgaaacattcgcatacacaacccaaattcccaggttttgtcagcagatcaatgttaataacaaatcaagttttttttttaaaaaaaacagtgaacagtgttttatacaagcatattgactatttctttcttaaccttaaacattctaaacgtaaaattgtaaagaagattctcctgagttatctttaatgatatttatttcattttctccctcttcccaaaagaaaatttttttcaattatttatataaatactattatctgtaatcagcgtttgatttaaaaatattaaaancccacagtgcttgacacagaatattttctcaataaattgtggctgaacaaattaacgaagcatccacagatccctcaaaacattttaaaaggtcagtcttatggcacattcaggctaatgagaca

SEQ ID NO: 8 - DNA, 195 bp, Homo sapiens
accattggtggccaattgatttgatggtaagggagggatcgttgacctcgtctgttatgtaaaggatgcgtagggatgggagggcgatgaggactaggatgatggcgggcaggatagttcagacggtttctatttcctgagcgtctgagatgttagtattagttagttttgttgtgagtgttaggaaaagggcgt

SEQ ID NO: 9 - DNA, 499 bp, Homo sapiens
acaatttctttatattcttccttggtgatatctttattttggtaaaatggcttgatggccaattttacctcttgtgctgctttttcttgaatttgcaatttctgatgagaagaaaatgtataatttattatttgccagtcatactgctctcacaaaatcccaaacaagaaattgaaaatacttcatatttacaataagagactctccaactattaacgtgacaaatataaaacagtttatttactaaaacatatcaaacatttctaaaaacaattataaaatattaccagtaatttactggacatcaacacatctagagagaatccttcaaataataatggcatttagacagccaataagaaattcccttcaccactcatacaataaaaagctgatattttttctcctttatcatatacagaattatgaaggttgctctcaaccttgaacttgccttgtctgtcttcgagctatctgcgctggcttccactgcaacact

SEQ ID NO: 10 - DNA, 539 bp, Homo sapiens
acttacaacagttttaaagcaattgatactttcagaacaatctcaagcttaattggttaccattataagatgcagaactttttaatgttttctggtccctgaaaattcaatagggccaaatgcattaactggaaatagcatttttttaaagtcttaatcaaagatgataatggataaaacaactatataggctctcatacacaatctttcttaattttcaccttgtaagaaatgattacaatgtccttcaggcttgttatacacccccacagaatcaagaagaaagccaacaaagaattgaacatttcaacaagctaggaaatatttactgtaagcatattgtgaaattctggaagacatactatcaatactttgggaaaacactattaacatgtgttgaagaaggcagtttataaatgaaacattacaaatcttatgtttatgcatacaacttataaaatagaaaaaagctgctatttttccaatagtatagcatcacactaacactatatagttaagattgaaaacttctgtacctc

SEQ ID NO: 11 - DNA, 318 bp, Homo sapiens
gcagaaatgaatggctcaaaacttgggagaagagcaaaacctgaaggggccctccagaacaatgatgggctttatgatcctgactgcgatgagagcgggctctttaaggccaagcagtgcaacggcacctccatgtgctggtgtgtgaacactgctggggtcagaagaacagacaaggacactgaaataacctgctctgagcgagtgagaacctactggatcatcattgaactaaaacacaaagcaagagaaaaaccttatgatagtaaaagtttgcggactgcacttcagaaggagatcacaacgcgttatcaactg

SEQ ID NO: 12 - DNA, 168 bp, Homo sapiens
acctgtgggtttattacctatgggtttatatcctcaaatacgacattctagtcaaagtcttggtaatataaccaatgttttcaaatgtattctgtcatacaaagagcagatttttattgaacttgtgcaataactatattaccatacaatataaatattcatgaatag

SEQ ID NO: 13 - DNA, 410 bp, Homo sapiens
acattaaatgataatgtttgaagatcacacaaagatttcacaaaactataactaatacagaaagatgtgtgaaaacattaggggctttcaaaattttaggtatggaattttgcaaagattattttggcttataagtgttaggcaatcactaacctgaaataagtgacaaaaacatgcagatgattaccatttcaacaaatgaaaagctataaatgtctagctaaaagctaaaatattgtgtagctgaaatactaccatataacaatgggaatttataaaacaggaaaaaaggttattctttaaaagtcttccatgagtaatagactttcagtaattttctataaaaacattcagaaattaagtttctcaaattatgtttatcaccaaaattatgttttcagtagtgactg

SEQ ID NO: 14 - DNA, 374 bp, Homo sapiens
acacaatggtttattaaaggaatgtatggcccacatcaacctagcaaggattctactggtaaaccttcctatggccaaaggaaaaacaagcaggagttgagtggctggggtggggtgcaggcaatggagagagggcagaagggtgtagaagctgaaggggtctagaagcttactcctgagtttcttccttctgtcttcaaatctttacttcttatggccaaagacccagctgtttcataggctggagatgcactcttctagactgctcgagacagccagagacaggggaggagggaagaaggatactgtggaaagggatggcggggcaaacatttagagctagaagccactactgggccaatgctaaagtttct

SEQ ID NO: 15 - DNA, 403 bp, Homo sapiens
accttcaccagaaattgtcccacattaaaggtctcatcctggagtttgaggaaaagaacaggggcagctgaagttatcaagggaatttttgggcctctgcttagtgaaacacaaaggaacaaagcagctataaactaaatagaatgcaactatctgcttttcttatgctgaccactggagtccatggtggcaagtagagagctgctctaggttcttgaggtttggttttcattattaatttttagggtatgggcactgtgcaaagactccatagctgtgcctaggagtctaggaaaagtgacagaggcttggcttttttacctttagttcagccaagtcattttcaagtcctgagaaatgacatcatcttcaggataaaataatgaggacattagacaaacca

SEQ ID NO: 16 - DNA, 494 bp, Homo sapiens
accctcttcaagaatcggatggatgtcgttttgaagggcgacaatcttcctcagtatagaggggtgaacattcggagattgctcaacggtagcatcgtggtcaagaacgatgtcatcctggaggcagactacactttagagtatgaggaactgtttgaaaacctggcagagattgtaaaggccaagattatgaatgaaactagaacaactcttcttgatcctgattcctgcagaaaggccatactgtgctatagtgaagaggacactttcgtggattcatcggtgactccgggctttgacttccaggagcaatgcacccagaaggctgccgaaggatatacccagttctactatgtggatgtcttggatgggaagctggcctgtgtgaacaagtgcaccaaaggaacgaagtcgcaaatgaactgtaacctgggcacctgtcagctgcaacgcagtggcccccgctgcctgtgcccaaatacgaacacacactg

SEQ ID NO: 17 - DNA, 478 bp, Homo sapiens
  misc_feature 15, 293, 348, 354, 361, 372, 388, 437, 438, 440, 465: n = A,T,C or G
acaggtcagagtctncttttcttttctttttgagatggagtcttgctctgttgccagactggagtgcagtggtgcgatctgggctcactgcaatctccacctcccgggttcaagcgattctcctgcctcagcctcccgagtaactgggactacaggtgcgcgccaccaagcccagctcatttttgtatttttagtagagatggggtttcacgatgttggctaggatggtctcgatctctggtcagagtcttttctgtaaatatccttggtaaagaagcaattttagactgtanctgttgcaaatgctttaaggaagaagcaaaaacaactgttcagtcttcctgaaantgaaanaaactanaccagggctgntatatcagaggaaccncaaccagcactccaatcatgatgccgacagtggtcccagctggagagannangagaagttccagatgcagagactgngatgctcttgact

SEQ ID NO: 18 - DNA, 431 bp, Homo sapiens
acgagctgcaggaggttatcggcagtggagctactgctgtggttcaggcagccctatgcaaacccaggcaagaacgtgtagcaataaaacggatcaacttggaaaaatgccagaccagtatggatgaactattaaaagaaattcaagccatgagtcagtgcagccatcccaacgtagtgacctattacacctcttttgtggtcaaagatgaactttggctggtcatgaaattactaagtggaggttcaatgttggatatcataaaatacattgtcaaccgaggagaacacaagaatggagttctggaagaggcaataatagcaacaattcttaaagaggttttggaaggcttagactatctacacagaaacggtcagattcacagggattttgaaagctggtaatattcttctgggtgaggatggttcagt

SEQ ID NO: 19 - DNA, 146 bp, Homo sapiens
acaaacttttattaggatatctatttatttaatactgaactttggcctactttgtgataagactataaacaaattgaggaaatcactatttctcacttctgtatttctcaaaaaataattttgttacagagttcaatatactgtgt

SEQ ID NO: 20 - DNA, 459 bp, Homo sapiens
  misc_feature 358: n = A,T,C or G
agctgatgtggcttattattttgaaaaagatgttaaaggtgaatccttgtttcattctaagaaaatggacctgacagtaaatggggaacaactggatctggatcctggtcaaactttaatttattatgttgatgaaaaagcacctgaattctcaatgcagggtctaaaagctggtgttattgctgttattgtggttgtggtgatagcagttgttgctggaattgttgtgctggttatttccagaaagaagagaatggcaaagtatgagaaggctgagataaaggagatgggtgagatgcatagggaactcaatgcataactatataatttgaagattatagaagaagggaaatagcanatggacacaaattacaaatgtgtgtgcgtgggacgaaggacatctttgaaggtcatgagtttgttagtttaacatcatatatttgtaatagtgaaacctgt

SEQ ID NO: 21 - DNA, 571 bp, Homo sapiens
  misc_feature 17, 29, 31, 40, 51, 91, 106, 142, 179, 180, 437, 460, 465,488: n = A,T,C or G
accatttgcctcccggnctcaagcgattntnctgcctcancctcccaagtngctgggattacaggcacctgccaccatgcccggctaattnttgtaattttagtanagacagggtttcaccatgttgcccaggctggtttcnaactcctgacctcaggtgatccacccgcctcggcctnncaaagtgctgggattacaggcttgagcccccgcgcccagccatcaaaatgcttgtttatttctgcatatgttgaatactttttacaatttaaaaaaatgatctgttttgaaggcaaaattgcaaatcttgaaattaagaaggcaaaaatgtaaaggagtcaaaactataaatcaagtatttgggaagtgaagactggaagctaatttgcattaaattcacaaacttttatactctttctgtatatacattttttttntttaaaaaacaactatggatcanaatanccacatttagaacacttttttgntatcagtcaatattttttagatagttagaacctggtcctaagccctaaaaagtgggcttgattctgcagtaaatcttttacaa

SEQ ID NO: 22 - DNA, 283 bp, Homo sapiens
actagaagcagccctaaaattaaacaaggatctttatgtccatacgatgagaactctagatttattggccatggaaccaggcatggtaaatggagaaactgagagttctactgctggattgaaagtcaaaaccgaagaaatgcagtgccaggtgtgctatgatttgggcgcagcatacttccagcaaggctccacaaattcagctgtctatgaaaatgccagggaaaaattttttagaaccaaagaactaattgcagagataggttcattatctcttcattgt

SEQ ID NO: 23 - DNA, 496 bp, Homo sapiens
accacagcctcatcccttggtcaacaatctacaaccttccacagcagcccaggcgacactgaaaccacactcttacctgacgacaccataacctcaggcctcgtggaggcatctacacccacccacagcagcactggctcgctacacacaacactgacccctgccagctccacaagcgctggtcttcaggaagaatctaccactttccagagctggccaagctcaagtgacacaacaccttcacctcccggcaccacagcagcccctgttgaagtatccacaacctaccacagccgcccgagctcaactccaacaacacacttttctgccagttccacaaccttgggccgtagtgaggaatcaacaacagtccacagcagcccaggtgcaactggaacagcactcttccctacccgctctgcaacctcagttcttgttggagaacctacaacgtcacccatcagttcaggctcaacggaaacaacagcgttacctg

SEQ ID NO: 24 - DNA, 464 bp, Homo sapiens
acgtggcaggaccgaaacctgcttcagcagtattcccctactatgtctgccacacatggttgtagaggttaacctaatataagctccctgttccttactaatagtaacaggtagtttttgtttctcttgagaccaagtttagatgtgactgaacattttcactgagcggggtgaagtcaagcaagggggatttgttcttccactggtatagaaattatgttttgaaattttcacattgtctcatggaatttccctgtgagttttcttctggtgagtgactcagttttgcttcctactagacactctgcatctgtatattcagcctataggtaatacttgtgtggttttattaaaatctgaaaaagttagaaaaagtattttcagctggtgtgggtgtccatcctgaataagttcatttgtaaatatttcctcagggattggaatcaaacagttaagcttttaaa

SEQ ID NO: 25 - DNA, 502 bp, Homo sapiens
  misc_feature 475: n = A,T,C or G
acctgtgggtttattacctatgggtttatatcctcaaatacgacattctagtcaaagtcttggtaatataaccaatgttttcaaatgtattctgtcatacaaagagcagatttttattgaacttgtgcaataactatattaccatacaatataaatattcatgaatagtttcccaagtctggagcgaccacatagggagaaaatgtaaatgtctcaatttttgttcacaaaagtatattttatcaaattgctgtaagctgtggatagcttaaaagaaaaaaagtttcctgaaatctgggaaacaagacatttaaagaatcagcaaaatttcaaataaaaaattatgaaaatattatcctcattagttcatttagtcccatgaaattaattattttctctgcttgatcttggtggacagttttcatgaagctgtcagttagttcattaaagttttggaaattctcagacagtgcantggtatcagaaacttgtattcaagagt

SEQ ID NO: 26 - DNA, 386 bp, Homo sapiens
  misc_feature 370: n = A,T,C or G
acggtcagtctgccctaccatcttgggagctaaaattctaaatgtgtgaacagaagagttaatacttcaatgttcaattctgaaatttagaacaatttatatgatttgactagactgctcaaagcaattacaaacacacaattgagtaggtagttggttattttgcttttctgtgggtgggcagtcaaagaacagagagtaacaaatggagtaagaaaaaaaattttgtttctcattttgggggtattcagggggaatcacagggaagtttaaacctctgaaatccatttgaccgatgcactgaggtccaagatgaaattttcaatttcttgaataaccccctttccttgagtatcaaactgattggtangtcacatctctaaagt

SEQ ID NO: 27 - DNA, 449 bp, Homo sapiens
acctaaatattttatcaatttgaaacacaaattcataaattgtcattattctcagaggcaacaaagcatagaaataaatatttaagttttttctttcttttcttcttcaatctgtgttttaaggctcagagcagacattaagaaatatcaaacaattttttataaaaagtttttcaaatgtttggcccaaagtgaagttgttctgttgatgttatttaaatattcctctcatcttctcagccacaacttcaaagacgtgttcatgccagtcattcacccaaaataaatttcaattcaatgaaaagtaaataacttagggatctataaatgacactgcaatgtatcttgttccatttttaacaggaagtccttcatgcaaatgtgtgagtctcccaggatgcatgaagctccagccttttcgtggtgactcaatagagcaattgtacctc

SEQ ID NO: 28 - DNA, 462 bp, Homo sapiens
  misc_feature 371: n = A,T,C or G
acttcgctcatcaggcataatgtctaaaatctaatatacataattccattaagtggttgaaggaagcaaataatggaattgtcaattggtcatctggctgtaaggtttgcccttgaactaaaaatgttgtttggggcaagggccagaaatgtggagacatggtttttgttacgcattcttgtattatatgtgactaaatttacaaacaagatacatgtgtaattaaagacccttatggaactggaagacgtcttgtagtgctacattgggtgaaaccgttggtccatttttgtctgtttctatgaagataaaataattgggggccatctagaaatagaaaggcagtgggaagacagattctacggcactgntttcatttaattgggctttaggcactccattcgaatgcagaacctcacctctagttgagaccaagaattggcaaatttgcatgagctcctg

SEQ ID NO: 29 - DNA, 305 bp, Homo sapiens
  misc_feature 41, 137, 144, 199, 217, 235, 257, 266: n = A,T,C or G
acaagctttttttttttttttttttttttttttggctctanagggggtgctatagggtaaatacgggccctatttcaaagatttttaggggaattaattctaggacgatgggcatgaaactgtggtttgctccacanatttcanagcattgaccgtagtatacccccggtcgtgtagcggtgaaagtggtttggtttanacgtccgggaattgcatntgtttttaagcctaatgnggggacagctcatgagtgcaanacgtcttgngatgtaattattatacgaatgggggcttcaatcgggagt

SEQ ID NO: 30 - DNA, 370 bp, Homo sapiens
acattccacaagcattgccttcttattttacttcttttagctgtttaactttgtaagatgcaaagaggttggatcaagtttaaatgactgtgctgcccctttcacatcaaagaactactgacaacgaaggccgcgcctgcctttcccatctgtctatctatctggctggcagggaaggaaagaacttgcatgttggtgaaggaagaagtggggtggaagaagtggggtgggacgacagtgaaatctagagtaaaatcaagctggcccaaggtgtcctgcaggctgtaatgcagtttaatcagagtgccatttttttttttgttcaaatgattttaattattggaatgcacaatttttttaatatgcaaat

SEQ ID NO: 31 - DNA, 202 bp, Homo sapiens
acttaaactggctttgtatatatgtataaatgctggtggtggtgaaagtagtcttgttttatgaggatgtctgcattaaagcagtaaaataagctttccattttattcataatctaatgtgtgtgtatatatgtatgtgtgtatgtgtgtgtatatatagatgtatatatatacacacacagagatatatacatatggctgt

SEQ ID NO: 32 - DNA, 527 bp, Homo sapiens
acaattttgaggtttattttttgtatttttattatttgtgcgaagaaccattattgagtttgcaagataagatgtatttgtattttctagtgtctttttatttataacaacacttttttggcaatcagtttgtagctgtgcccttatttttatagatagtttgccatttcttgggtttaatgtttaacaaggctatagaagtttaaaatagtggacaaatgtttgtgaatacacttttaaaaaattgttttaaaagagaaaagcggtcttgctttgttgcccagactggagtgcagtggcataatcatagctcgccgcaagcctcaaatttttgtgctcagatgatccttttcatctcggcctcctgattagctgggactataggcgtgtgccaccatgcccagctaattttgaaatttgcttgtagagatgggatctcactctgttgtccaggctggtctcagaattctggtgagtgatcctcccacagtggacttccaaagtgctgggattacaggtgtgagcca

SEQ ID NO: 33 - DNA, 481 bp, Homo sapiens
  misc_feature 307, 308: n = A,T,C or G
actggagcaaaagcccagtgtatatgaattggtattcctagagaaaaaaagaaatgctcacacctttgttattttaaagtgttttcttgaaaataattagggagaaaattttctggcaacaggttatgtaagacaacaactttttttattatttcaaaacaaaacaggcacatgccaccatgccccagctaatttttatattttttatagagacagggttttgccatgttgcccacgctggtcttgaactcctggactcaagcaatctgccagcctcggcctgctaaagtgctaggattataggcgnnagtctctgtgcccagcctgacaaaatcttttatttatttaaatgttagtaatacgtttattgatgagactaggagcttctctgcagcatcttcataatacattggttttagttcccacactattcccacatcttatctgggaagattagaaatacagatgtaatatggaagct

SEQ ID NO: 34 - DNA, 51 bp, Homo sapiens
cttttgtatgagctgtggctttttcccattgtgaagcattgaatatcacat

SEQ ID NO: 35 - DNA, 134 bp, Homo sapiens
actaaatattgctgagagcatccaccccaggaaggactttaccttccaggagctccaaactggcaccacccccagtgctcacatggctgactttatcctccgtgttccatttggcacagcaagtggcagtgtta

SEQ ID NO: 36 - DNA, 512 bp, Homo sapiens
  misc_feature 461: n = A,T,C or G
tttagagacggagtcttgttcagctgcccaggctggagtgcagtggctcgatcttcgctcactgcaaccaccgtctcctgggttcaagcgattctcctgtctcagcctcccaagtagctgggattacaggccaccaccatcatgcccggctaatttttgtatattggtagagacggagtttcactatgttgggcaggctggtcttgaactcctcgcctcaggtgatccgcccgtcttggcctcccaaagtgctaggattacaggcgtaagccaccatgcctggccagatgatgtatttaaatatcataccaaactctgtgtatttatataaagagagactgttaaaagacttcataatataaaaaaaaacaaaaacaaaaacaaaaaaaaactttacgcttaccattgctgcatattgttgcagtataaaacacacacttatctgggatcatgagaatacngcaagaatgtcctgcgtaaactgtaactttgacagcatttaaaaaataaaa

SEQ ID NO: 37 - DNA, 399 bp, Homo sapiens
actataagaagacatgcacacaaagatgtttgttatgattattgaagtgttaaatggaagaaaaatgttacccaagtcttctccaaaaagaatggtagatatttccttgaaatgcctaacccatttctggatgagactcatcaatatccccttcactccactctctgccaactcagatataatttccattgggcaccttcacagtaatgccaggattggggcagagatcctgaaagagcttcttataagatggcaaatgtgcctggcaagagcatttgtattttgtcaggtggaggcatgtgctgagagttattcaactatctgaaatgttgaatttggaggttgtgaaaatattgaattatgctattagtttaataatatctgaggcagtaaaatagt

SEQ ID NO: 38 - DNA, 242 bp, Homo sapiens
actctgagaacaattaaaattgtccagagatcatttatattaccttccaaattgtttattacccaagatcctttgggagaaaatcttatagaatgggggaacaatatgtggtttaaagttattttaaaatgccagttaatttcctcggcaaaggacaatagaggaacttagcttaattgtctggctttaatttaaactgtgttaatacaacattaaaataaaacactaaatacttttgaggt

SEQ ID NO: 39 - DNA, 526 bp, Homo sapiens
  misc_feature 198, 280, 300, 302, 373, 416, 426, 509, 517: n = A,T,C or G
acaagcttttttttttttttttttttttttttttgggttttctaattttatttgaacacaaaatatttaattttttgcatgtagagaataagaggtaatcattagcctgaaaagagaggatttataatcaacattatgcagaaagaaagcaaaattacaaataccagcctactcacatgaaaatttttcatgtttacnctgatatatatctgagtgcttatcatcaaagtaggaagttaaaaaaaaaaaggcagcttaacaaagttccagtgtttcaaanaaagcacttttaaaaatgtntntacatgaacgaacatttcattatatcataaaataaatgctgcgctgtaagataaaggaagactaacatatntggagtttttggcctttttccgccccctccagctgcaaccatntttaacctgntgaacttaatctcaagggttacaggagtttttttgcttttctttttttctcctgttcagttcacatttcaggctgttcggcanatgcctgngattctgga

SEQ ID NO: 40 - DNA, 407 bp, Homo sapiens
  misc_feature 143, 148, 150, 174, 185, 199, 219, 231, 236, 245, 251, 253,259, 305: n = A,T,C or G
acacctttgactacagctgcagaagtgttcctttagacaaagttgtgacccattttactctggataagggcagaaacggttcacattccattatttgtaaagttacctgctgttagctttcattatttttgctacactcattntattngnatttaaatgttttaggcaacctangaacaaatgtnaaagtaaagatgcnggaaaaatgaattgcttggnattcattacttnatgtntatcaagcncagcantnaaacanaaacccatgtatttaactttttttaggatttttgcttttgtgattnttttttttttgatacttgcctaacatgcatgtgctgtaaaaatagttaacagggaaataacttgagatgatggctagctttgtttaatgtcttatgaaattt

SEQ ID NO: 41 - DNA, 265 bp, Homo sapiens
accattgattttggaaacttcccagtcgttttgtaagcttccactgccgagggaaaatgtaaaatggggaccccgaaataagtgctgatcatcatcagtagcctcgaaaatgagacttccaggtgcactgaggggatggcagaagaacaagcccgtgtagtccttggctagcctgggagggttgtcattcacatccataaggatcaggtggaactctgacacagagcttaaggaagacccccctacttctgtggccaccacttgt

SEQ ID NO: 42 - DNA, 455 bp, Homo sapiens
acagatttctgcagctcctcatatggtcagtgaactctgggatcggcgatggctgctcctctttgagcaccggcacatatcagtctgtcctcttgagtaggccattatcctgttaggtcccagcaggtgctccccggatgagagttgagctgaggagtcccctgagcatgagtcatccctcatgcactccgtgccacatctctgttcgtggagcactgactcttccacatgcttcctcttgggagggttagagctctttggggtgctggcactgaagtcctgtcctgtgatagatgacactgggtggtgggtgggtcgagccacttcggggacaggggcaggcctctgtctgcttctccaactctggatttccaggtttcttttgtctggggggagtttgtcaattttctgagcttttgagattagagacttcccacaagttccttgcagagaca

SEQ ID NO: 43 - DNA, 362 bp, Homo sapiens
acctaacaagggaagagaatctttcagatgaagggtcaacagaaaataaagaccctaaacacttctaaaagtagaacgcagttgaattttgcataactaatctgggaatggagtaaaagaaacaaggttacagaatgtagtgctttagggactttagaaattaggggcagtatgtatgagaatgtgtgctggacactggaggtgtcccaggagctttgaagcactaggtttggttcaatcccgacaaactcccagccatgtgcaagcactgcctcacggggtgcccagagccatgaattcttttcatctgagttggcatccggtcagctgagcatggaacatggggccaccccaaacgccgt

SEQ ID NO: 44 - DNA, 269 bp, Homo sapiens
  misc_feature 18, 19: n = A,T,C or G
actacaaggtaaaggaanncttaataaaatcaatggagcctttcataccagaaaggattttatttgaaatacccgtattacctttttagattttcttttctgaaatcatgcagagaatatgttctgtgtaaaatctaacatcgttcattggaaatatagaattttttaaaaataatggcacctaaaaacttaatactgtatatcaattaaagtcaatatagtggcatgtaaaatgaagtggaaaaaactaaatatatatatatatatat

SEQ ID NO: 45 - DNA, 404 bp, Homo sapiens
  misc_feature 299: n = A,T,C or G
acagatatctttccagtggacaattcagatactagttctagtgtggatggaaggagaaaacataagcaaccagctctcactgcagattttgtgaattattattttgagagaaatatgcgcatgattcaaattcaggaaaatatggctgaacaaaagaatataaaagataaattagagaatgaacaagaaaagcttcatgtagaatataataagctatgtgaatctttagaagaactacaaaacctgaatggaaaacttcgaagtgaaggacaaggaatatgggctttactaggcagaancacagggcagaagttgaatataccggcaattttgcgagcacccaaggagagaaaaccaagtaaaaaagaaggaggcacacaaaagacatctactcttcctgcagt

SEQ ID NO: 46 - DNA, 292 bp, Homo sapiens
  misc_feature 10, 11: n = A,T,C or G
acgatgtctnntgatgagtttgctaatacaatgccagtcaggccacctacggtgaaaagaaagatgaatcctagggctcagagcactgcagcagatcatttcatattgcttccgtggagtgtggcgagtcagctaaatactttgacgccggtggggatagcgatgattatggtagcggaggtgaaatatgctcgtgtgtctacgtctattcctactgtaaatatatggtgtgctcacacgataaaccctaggaagccaatttgatatcatagctcagaccatacctatgtat

SEQ ID NO: 47 - DNA, 464 bp, Homo sapiens
actaagtctagtgatcctttgggcaagttactgaggtgactttgagaatcaggccttctaatctgaagtgtttttatttcacaggctgaagtttctctttggctcatcagctacccaggccttggacctagttgatcgacagtccatcaccttaatctcatcacccagtggaaggcgtgtttaccaggtagaagtctagagatgggggtgatccctacagaaaccccttaggacaaaatgttcttcatctctgtagaagctgttgactagctttaaatatttcctggactgttaaaaggcttttgccccaacttggtaaaattaacgaattgataattttttaaaatttttatttacttttaactgacagaaactgtctatattcatggtatataacatgatgttttgatatatggataccttgtagaataactaaatcaagctaattaacatatctaatacct

SEQ ID NO: 48 - DNA, 308 bp, Homo sapiens
  misc_feature 16: n = A,T,C or G
actaggtttgcactanctaaaaaaataatgtttacagttgtctagatgtaacaattttaaaaacatacaaattcagtatgtagtatgaaaatacattaaaaaaacacataaggaactatgccccataaaaaatataaatgcaacttctattaattatatgaatatcaaaaattaaatattctgatttaaaagtagcttctataaaagtcggagtagtaggcattatttgctttcctaaatgtataaataagaagtatttctagctcaactaaacagaaatatcagtatttcttagcaaaaaatgtagt

SEQ ID NO: 49 - DNA, 237 bp, Homo sapiens
acaaagaccctcagagtaagaaaaaaggctggtggtatgcccattttgatggaccatggattgcccggcaaatggaactccatcctgacaagccacccatcctacttgtggctggtaaggacgacatggagatgtgtgagctgaatcttgaggagactggcctgactcggaagcgtggtgctgagatcttgccaagacagtttgaagaaatctgggaacgctgtggaggcatccagt

SEQ ID NO: 50 - DNA, 176 bp, Homo sapiens
acttggaaaaggaataatctcttggctttttaatttcactcttgatttcttcaacattatagctgtgaaatatccttcttcatgacctgtaataatctcataattacttgatctcttctttaggtagctataatatgggggaataacttcctgtagaaatatcacatctgggctgt

SEQ ID NO: 51 - DNA, 480 bp, Homo sapiens
  misc_feature 90, 94, 248, 250, 419, 432, 460: n = A,T,C or G
ttttttttttttttttttttgaaaaagtcatggaggccatggggttggcttgaaaccagctttggggggttcgattccttccttttttgnctanattttatgtatacgggttcttcgaatgtgtggtagggtggggggcatccatatagtcactccaggtttatggagggttcttctactattaggacttttcgcttcgaagcgaaggcttctcaaatcatgaaaattattaatattactgctgttananaaatgaatgagcctacagatgataggatgtttcatgtggtgtatgcatcggggtagtccgagtaacgtcggggcattccggataggccgagaaagtgttgtgggaagaaagttagatttacgccgatgaatatgatagtgaaatggattttggcgtaggtttggtctanggtgtagcctganaataggggaaatcagtgaatgaagcctnctatgatggcaaatacagct

SEQ ID NO: 52 - DNA, 512 bp, Homo sapiens
  misc_feature 304: n = A,T,C or G
actaatgactgtaagatgagctataaaatgcttttttttttggatacataatttatagactgggtgtcagaagacttttccaatctactttttgaataaaggaagatggaatataaaatgatttgtttcccttaaaaagagggagggcaggttatagactgaggaactgaacaattttaaaaagttcaaacaattatttgaaccaactatttaccatatctgcagagagtctagaaatcacaattaatttgacttctcgaattcaaaaacggttctgttttatgatagtaacgcaaaaacttcntacctataaattactgtatagaatgtttgtattaagctatttttctctgaatatgtctttagaagaacaaataaaatatttaaacatgtaattaatacatggaatataacaatttcataaaatactgaaatacattaatctttttgtaatcttattttccactagatgtatttaaattcttgaaaatgccttttgactatgacacaaa

SEQ ID NO: 53 - DNA, 413 bp, Homo sapiens
  misc_feature 376: n = A,T,C or G
acaaaaaacccttgagattaatttttttctaaaagaagaccttaccaaaaataacttttaaaaaatctgtcaaaccatatgatagacctgaatattttccttaagactgtaaactttttttctgaaaacaattataaaaaagtagtttataagtaggattatttttctttaaaattttccaagatcatattacttgacaaataagtgtcattttgaaatttaaaacatgattttttcctaataaaattattagttattctgacatcttattaacagatcttagttgaattccacttaatttccctggggacagctgagacactgcatttttccaaatagtcttaaaaagttaaagataggcattatttaaaggagngtcttacagtgaaaaaaagaaatcattcaaagaaaac

SEQ ID NO: 54 - DNA, 396 bp, Homo sapiens
tagaggggaagataccaaggtagatatgggggaggtcagtagatgcagacaaccagtctacaatgtgtagatatagacaggaaagaaaaaagaattcagagaccataaggctaaggaaacaagttgggtgtgaaaaaggaaaaaagaattaaggattgcagaaggaaaaagaaagaaaaaagatgggaacaaaaatatgatagcgtataaagagaagaagaaaagaatcacttctaattctctgccccactcttacctctaaattgtcccatcactactgtctactagaaccagagtctattattgattggcccacatcttaagtttgtgcccgcccaggaaaatcaagcacctttccttactttagtcttcaatcttagctgaactgtgtcacgt

SEQ ID NO: 55 - DNA, 366 bp, Homo sapiens
  misc_feature 253, 302: n = A,T,C or G
actgtgcaggtgggttagaggctgcgtggcaggagaggttcagattttcccctgatctgtaagatgtgtttagaggggaaatggtgggggcatccgggccatagaggacattcaggatgactgaatcactgcgcctggcactcactgggttctgggtttcacatttgtagcttgctgtgtcatttcttgtgacattgaatagagtgagggtcctgttgccattgggacagctgcagcctgggactgaccgggnaggctctgattgtttacccaccacaggtaggttgcgtcctgagtctcangttcacaggtgaaggccacagcatccttgtcctccacgggtttggagttgttgctggagatgga

SEQ ID NO: 56 - DNA, 474 bp, Homo sapiens
  misc_feature 276: n = A,T,C or G
ggcgggtggatcatgagatcaggagatcgagactatcctggctaacacggtgaaatcccatctctaataaaaatacaaaaaattagccaggcgtggtggcatgcgcctgaggtgccagctactcgggtggatcatgagatcaggagatcgagactatcctggctaacacggtgaaatcccatctctaataaaaatacaaaaaaaaaaaaaaaagaatgaagatgaccagtttacataatttatctaataacttccactttttgaaatatatctaanaataaggaattaaaccaaatacacaggtgccaacattggtttacagttatactaaagctcacatacataggtcataatagttctacaagtcctgactgtaggcccttagtctattttggattaagttctatagcagaattgttttggtttaccaaaaataaagtcagtcatggacagttgcaacaaaataataaactg

SEQ ID NO: 57 - DNA, 533 bp, Homo sapiens
  misc_feature 12: n = A,T,C or G
actgtaaatcanaatcacctgacgggcttgttaaaccagattggtaggccttactctcagagcttctgattcagcaggttttgcgtggggcctgcaaatatgcattatcaagttctcaggtaatgctatgctattagtctatggattacactttgagaaccactggactaggcatatgtgtaagagtgactgtgcgtgtgagtgtgtgtccccaggtgaattctaatcacaaaactactgtatagaaaatatcaataaggttctaagttttaggatactgagattttaatataataagagttgttaaacatcaagatgatttatagaaaggagacctatggacaaatatcaacttattggtcaataaaacttgttccttaaagtcttttacagtatttttttgaaaattaactttttttttaactgcatatatgggtccttcacttcatttttcagtaaagacaacttatttggatatcagtgtctcatcacttgataaggaccagtggaggatttggatagtagccagctgt

SEQ ID NO: 58 - DNA, 377 bp, Homo sapiens
  misc_feature 260, 367: n = A,T,C or G
acataaaatttacaaaaaaaagagacaggaaaattaaaataatcaaatctatataaatacatgaatcatgctgacaacacaggactgatttttcgtttgattattttaacacagacagatgtaaatcccaaaagacgttgggaaatggcacagccgatgaaaacctcacgatgacagtagttgggacactggaaatggctagcacgtccagaggcgcaggatccagcgcagccatgcccattcggctcaccaaaaaaagncttggaagcactgctgcaaagaacagcgcggattactcacatcacctctaggttcactaaagtcaggcactttggggggagttgagagtcagacttccgtgtgctgntgggaatcca

SEQ ID NO: 59 - DNA, 364 bp, Homo sapiens
acgctacaaacaaaagatatattagagacttttgaaaaatgctgaaatactttgcttcagaattggaatgtttatattatgtagaaatcttcaaaggtagcattattaaatagcaaagaataattagaacccacatatcttttttgtgtggatggggaaaatgttttaaaatccagttatttaatatgagtttgagagagaaaattgttttttaaaaatatatgtgcattgaaatgatggcaatgcttatagtatgatcaagtatgaaaggaactttaaattcttatatttacttttctctcagtaaattgttaaattttcactcagcaaaagattggcatttgttaagtgttctatatttagt

SEQ ID NO: 60 - DNA, 492 bp, Homo sapiens
  misc_feature 455: n = A,T,C or G
acttgcatttgacttacgatgtatctgtgaaaatgggatgatattgacaaatggagactcctacctcaatagttaatggaataataagaggctactgttgtgtctaatgttcttcaaaaaagtaatatcctcacttggagagtgtcaaatacatactttgaggattgactttatataaggtgccctgtagaaatctgttacacatatttttgacccatattatttacaatgtcttgataattctacctttttagagcaagaatagtatctgctaatgtaagggacatctgtatttaactcctttgtagacatgaatttctatcaaaatgttctttgcactgtaacagagattccttttttcaataatcttaattcaaaagcattattagacttgaaagggtttgataatctcccagtccttagtaaagattgagagaggctggagcagttttcanttttaaatgagtctgcagttaatatcaaatgtgagtt

SEQ ID NO: 61 - DNA, 378 bp, Homo sapiens
acaaagataacatttatcttataacaaaaatttgatagttttaaaggttagtattgtgtagggtattttccaaaagactaaagagataactcaggtaaaaagttagaaatgtataaaacaccatcagacaggtttttaaaaaacaacatattacaaaattagacaatcatccttaaaaaaaaaaacttattgtatcaatttcttttgttcaaaatgactgacttaagtatttttaaatatttcagaaacacttcctcaaaaattttcaagatggtagctttcagatgttccctcagtcccaatgttgctcagataaataaatctcgtgagaacttaccacccaccacaagctttctggggcatgcaacagtgtcttta

SEQ ID NO: 62 - DNA, 209 bp, Homo sapiens
  misc_feature 115, 118, 136, 163, 164: n = A,T,C or G
acaagaacctcactcactggacattgaaattctactgtccaatcccaactcactgctgttgatttgaaacctgattctggcagctcatttatcttggtttcctcatttgtaaggncgntcagttggactgatcatntctgagggccttgaagccctaacaagnntatcatgatcccagatgtaaaatatatatatgtgtatatatataa

SEQ ID NO: 63 - DNA, 448 bp, Homo sapiens
acttaagaataagaataacatggtccattcacctttatgttatagatatgtctttgtgtaaatcatttgttttgagttttcaaagaatagcccattgttcattcttgtgctgtacctgcccgggcggccgcccgggcaggtacggctatagcctggactttcctgttgtctacaccaatgcccaactgcctgccttagggtagtgctaagaggatctcctgtccatcagccaggacagtcagctctctcctttcagggccaatccccagcccttttgttgagccaggcctctctcacctctcctactcacttaaagcccgcctgacagaaaccacggccacatttggttctaagaaaccctctgtcattcgctcccacattctgatgagcaaccgcttccctatttatttatttatttgtttgtttgtttttattcattggtctaatt

SEQ ID NO: 64 - DNA, 298 bp, Homo sapiens
acattcaccattaagatttgtagtctcatggttttctgtgggattagaagtctgttcagaaggggaaatgcttgcagcattgtccatatctgctagagataatgattctgggtgagaatttagagaattttcctcagaagactcttgatcaaccaaatcaacctcctgagaacttgatgaaatctgttcaccactctgattctgagaatcattttcagaggatggttgttcttcattttccatttcaggatctgtatgagaaagaaacaaacctcatgctacttctctaaaaaaatgt

SEQ ID NO: 65 - DNA, 235 bp, Homo sapiens
actataagaacacattaattcaatggaaatacactttgctaatattttaatggtatagatctgctaatgaattctcttaaaaacatactgtattctgttgctgtgtgtttcattttaaattgagcattaagggaatgcagcatttaaatcagaactctgccaatgcttttatctagaggcgtgttgccatttttgtcttatatgaaatttctgtcccaagaaaggcaggattaca

SEQ ID NO: 66 - DNA, 349 bp, Homo sapiens
acttcaactttaatttctctgtattttcttcctggaaaaatttggtgttaattttcttgctgatgatttgtgttcgaatgtaatccttcacagctaggcagagcctcatttgctccaaaataaattccactcgctctttcttttccattgacccgtaggtttccacctgtaactcctgtaaaatggaggctgcctctttcacatcaccattttgttcttttatagttgctaatgttttagtcagtcgcgcacgctcaatttcaacataaatcttgccttcggtaaccattcgtagagtatcaattaatcgaagtttgataggaaggtctgtgatttcctcaacataagt

SEQ ID NO: 67 - DNA, 238 bp, Homo sapiens
acgatttttcaatgttaaagttcactttcaagtatgatcaataacaagacatcaaatgtaaaaattatgctgtattatcattttctccattgcttcttaaaccactgaaagtaatttcacaattcaccacatttaggcatcttctttttcactttcttcattttttacttctttaggcaacaatggatcaatcttcagtaataaaccttcacttgttgaactacgaaggaaagcacgt

SEQ ID NO: 68 - DNA, 286 bp, Homo sapiens
acagacattttatttctattttgaaatgagttatctattttcataaaagtaaaacactattaaagtgctgttttatgtgaaataacttgaatgttgttcctataaaaaatagatcataactcatgatatgtttgtaatcatggtaatttagatttttatgaggaatgagtatctggaaatattgtagcaatacttggtttaaaattttggacctgagacactgtggctgtctaatgtaatcctttaaaaattctctgcattgtcagtaaatgtagtatattattgt

SEQ ID NO: 69 - DNA, 496 bp, Homo sapiens
  misc_feature 413: n = A,T,C or G
acacaatttaaactgaaagttcattgactattatattgccatgaacctcttctgcctgtgttaaagcacagcagggaggcctggtgggtgtgacggccccctacgtcctcctctgcagacggaatccgacggtggatccatacaccggccccatgatcaagatcccgctcggcccacgtaggcctgagtgcttaaccagcacgtgtccacaccggtcaaactgatcttcacaggctgttggtaattcaacactgtcaatgcatctttaagaatttctttatagatgaaagagaatgttctttgttaataaagacttgagccaaccccattgctacttaggaatattgttttggagatttccatcggaagtcactgcgtatacccattctttttttaaggctacttcccataangctcatgttttgaagccactctaacagaagcccaacctctggcgtctaacccttggttcacttctgaattttcagatgatggg

SEQ ID NO: 70 - DNA, 343 bp, Homo sapiens
actttttattgggtaaaaatggaattgaacagcaacctcaacataagattttttttctagtagcctcccactgattaaagaagcaagtttgaggtttcatccttcaaaagggggttccgagagagcaccgtagggcttttctcaaatagaaaagccagattttgaaaaaattttaaagataaaataggacatattttgcagatatatatatatatacacaaacacatctccaggtatagagaaccatccagatgttcacttttgaaaatatctaatgatgcaaagttttattcttgaacttggacactgatgccatcaaacaaattaacaaatatatttaagt

SEQ ID NO: 71 - DNA, 393 bp, Homo sapiens
  misc_feature 376, 379, 381: n = A,T,C or G
acttcaacttgtttctgtagaaattgccagaaatgttgatgccttcacagcgtacttaaaaagttttttaaaaaataattaaatgcactactcatctcaatgaaatttttcgttttcctattttctagaactttctaaaaaaggaaacaaagcaaaaacaacaacaaaaaaaacctgtttgacttaaggacacttgctgatcttgacacttgataatactttaagaaatggaaaggttttcctaaatctaatacctgcttaatataatccactttggaagattcatctgaaagaaacatagggtttgatttttaatactaatataaaataatctgccttccaatcaaaacaaaaatgttttcaactgtatacgctnctngnttgtgttttgtt

SEQ ID NO: 72 - DNA, 271 bp, Homo sapiens
  misc_feature 147: n = A,T,C or G
acaatgcaagttcttttgccaagttcacgcttattgtgacagatgtgaatgaagcacctcaattttcccaacacgtattccaggcgaaagtcagtgaggatgtagctataggcactaaagtgggcaatgtgactgccaaggatccanaaggtctggacataagctattcactgaggggagacacaagaggttggcttaaaattgaccacgtgactggtgagatctttagtgtggctccattggacagagaagccggaagtccatatcgggt

SEQ ID NO: 73 - DNA, 460 bp, Homo sapiens
  misc_feature 359, 446: n = A,T,C or G
acttcagttggtgcacaaaatactgtcatttgctcaaagctggctgccaaatgtttggtgatgaaggcagaaatgaatggctcaaaacttgggagaagagcaaaacctgaaggggccctccagaacaatgatgggctttatgatcctgactgcgatgagagcgggctctttaaggccaagcagtgcaacggcacctccacgtgctggtgtgtgaacactgctggggtcagaagaacagacaagggacactgaaataacctgctctgagcgagtgagaacctactggatcatcattgaactaaaacacaaagcaaagagaaaaaccttatgatagtaaaagtttgcggactgcacttcangaaggagatcacaacgcgttaccaactggatccaaaatttatcacgagtattttgtatgagaataatgttatcactattgatctggnttcaaaattcttct

SEQ ID NO: 74 - DNA, 151 bp, Homo sapiens
acccggaagagtcacatgaagatgatctgttttaaaatgtgaggcgattattttaagtaattatcttaccaagcccaagactggttttaaagttacctgaagctcttaacttcctcccctctgaatttagtttggggaaggtgtttttagt

SEQ ID NO: 75 - DNA, 415 bp, Homo sapiens
  misc_feature 381, 382, 398: n = A,T,C or G
ccctgtgggtttattacctatgggtttatatcctcaaatacgacattctagtcaaagtcttggtaatataaccaatgttttcaaatgtattctgtcatacaaagagcagatttttattgaacttgtgcaataactatattaccatacaatataaatattcatgaatagtttcccaagtctggagcgaccacatagggagaaaatgtaaatgtctcaatttttgttcacaaaagtatattttatcaaattgctgtaagctgtggatagcttaaaagaaaaaaagtttcctgaaatctgggaaacaagacatttaaagaatcagcaaaatttcaaataaaaaattatggaaaatattatcctcattagttcattttagtcccnntgaaaattaattattntctctgcttgatcttgg

SEQ ID NO: 76 - DNA, 343 bp, Homo sapiens
acagttggtgaaggaagaggtaacaaaaaatgctaaatattttatccatgaaaatgacttccagaaaaggaagaatatgaaccccagaccgaaggggaaaagatagttaatagtattatctaacctggttggtatttgtaatgaatggtgattttaattagtcattagccataatgatgtttatttacagtataactcctgaatgctacttaaataaaccaggattcaaactgcaagccagccaggccgttcattatttaaaacgttttaatcggggcttccgggtagaaggtggagcggcagggtgtaattgggttgatgggtgggacctgtcttgaccatc

SEQ ID NO: 77 - DNA, 446 bp, Homo sapiens
  misc_feature 381, 405: n = A,T,C or G
gctacagcttggactattttttctaaatttttagcattagtccatttctgctgctaacaattgaatccagaaatctactttctccatcttccactgttagtgccagtgagcaatactgttgtgcaacaaaaatgtcactttatctcagtgtgaatgagtagtctaaattccctttctaccattgatttaaatatatatattggtaagagagactgcccatgtgtttagaatagaattttttaaatgaaatgatcaacgggtggaatttgaaatatattcttctacaaaagagatttctttcccttttatattttgatgattgttttcttaagattaagatatgttcttgctcttttataagattatttaaattatgttttncctctgattttttttcaccattgnatttactaagttattggatttacatgaaatctggcacttta

SEQ ID NO: 78 - DNA, 306 bp, Homo sapiens
  misc_feature 70, 84, 221, 237, 241, 270, 272, 279, 284, 288, 301: n = A,T,C or G
caagcttttttttttttttttttttttttttgctcacaaaagtatattttatcaaattgctgtaagctgnggatagcttaaaanaaaaaaagtttcctgaaatctgggaaacaagacatttaaagaatcagcaaaatttcaaataaaaaattatgaaaatattatcctcattagttcatttagtcccatgaaattaattattttctctgcttgatcttggnggacagtttcatgaanctgncagttagttcattaaagttttggaaattntnaaacagngcagnggtntcaaaaacttgtnttcaa

SEQ ID NO: 79 - DNA, 553 bp, Homo sapiens
accagccaacaggaagaccacggggaagaccagaaggaaggagaaatcctatatactcactaatagataagaagaaacaatttagaagcagaggatctggcttcccatttttagaatcagagaatgaaaaaaacgcaccttggagaaaaattttaacgtttgagcaagctgttgcaagaggattttttaactatattgaaaaactgaagtatgaacaccacctgaaagaatcattgaagcaaatgaatgttggtgaagatttagaaaatgaagattttgacagtcgtagatacaaatttttggatgatgatggatccatttctcctattgaggagtcaacagcagaggatgaggatgcaacacatcttgaagataacgaatgtgatatcaaattggcaggggatagtttcatagtaagttctgaattccctgtaagactgagtgtatacttagaagaagaggatattactgaagaagctgctttgtctaaaaagagagctacaaaagccaaaaatactggacagagaggcctgaaaatgtgacaggatcatga

SEQ ID NO: 80 - DNA, 221 bp, Homo sapiens
  misc_feature 16: n = A,T,C or G
actgcttgttctctgnggaggagatgattaaaataaaaatcccagaaggacaggaggattctcaacactttgaatttttttaacttcatttttctacactgctattatcattatctcagaatgcttatttccaattaaaacgcctacagctgcctcctagaatatagactgtctgtattattattcacctataattagtcattatgatgctttaaagctgt

SEQ ID NO: 81 - DNA, 466 bp, Homo sapiens
actttgaatatggagtagtttacagctatttttttttcttactggtaatcttaactaatatgattcccttgttagagagcctctcactcccccacccccaaaaatgtctactattcatgacagtaaccaattattctggacaaattgcttctttttaatttgagctatctgccatggactttctaaaatggaaacacagcctgagtgtatcttagggagagtttgattgaaaaaatccaaatcactatccatatagatcatggatataaagagatacctgatttttattaaaaagatactttttcaaatttaagagttaatcttggaaatttggaacaagtaaaggggcaagtaaaccttttgatgaaatataaaaggaactcattgcatgaagttgactatcaaattctgtgatgtgtggcttcttaaaaatattctcagtgtcttttgtgtgcgtgcagcatgt

SEQ ID NO: 82 - DNA, 468 bp, Homo sapiens
  misc_feature 357, 358: n = A,T,C or G
acttcagttggtgcacaaaatactgtcatttgctcaaagctggctgccaaatgtttggtgatgaaggcagaaatgaatggctcaaaacttgggagaagagcaaaacctgaaggggccctccagaacaatgatgggctttatgatcctgactgcgatgagagcgggctctttaaggccaagcagtgcaacggcacctccatgtgctggtgtgtgaacactgctggggtcagaagaacagacaaggacactgaaataacctgctctgagcgagtgagaacctactggatcatcattgaactaaaacacaaagcaagagaaaaaccttatgatagtaaaagtttgcggactgcacttcannaaggagatcacagcgcgttatcaactggatccaaaatttatcacgagtattttgtatgagaataatgttatcactattgatctggttcaaaattcttctcaaaaaactca

SEQ ID NO: 83 - DNA, 77 bp, Homo sapiens
  misc_feature 12, 25: n = A,T,C or G
actacactgacntgatttgcagtcntgtttttcttcctaccccttaaggctacaaaattctgttgcaaatgcattgc

SEQ ID NO: 84 - DNA, 202 bp, Homo sapiens
actttcttaatgggctgaataaattaattacaattaagtttgctttacatcctgttgaggacctctttgcagccccaggacctaacaatatctggcaggctccaagaatgctcatcaggtgaaatgatggcagaacatttaaagtaaggagccagttacttcagcttaagtcattcagagccaaacatctgaagaacgacca

SEQ ID NO: 85 - DNA, 349 bp, Homo sapiens
acgtggacagccttaggataagctgacattatagatgcagctaggtaggcaacaaaccatagtgccaaatggaaaaagtatatttgcaaataaattttaaaaactaagttaattttttataattaaatacagaaaatatactgatttgctaaaataaataagatgtgatgtattaacacttcactataaagaatgcataccagaacatttataaacagtgagtgagttttattaagaatagtttactacaataaacgctggctaaatagaagtgcattttgtgaagcactatgggtggtatatgttttgccacatactcttgttaccttgaggtagataacacatgtgt

SEQ ID NO: 86 - DNA, 397 bp, Homo sapiens
  misc_feature 273, 379: n = A,T,C or G
actctttatgaaagtctgaaattataaatagaaaagaaccatcaagatactttttaaaaacctaacattgtatattctgaaccacatgctaattaaaattcgttgttcattacacagcaccaatacccatgatacatcttacaagaacaaaactaacatatttggaaaaaagagaaaaaaaaattctgcttcatttacgaatgttgccaaaggaggcaagttttcaactgaaaacaaaacataaaggtctatgtggatgcagccaaatgtttntccatttaggaaaatcatcataaaaggtggcagcactttttttgcttgttaactattatttacttataactggctgcaccaacatttcatctcaattttttggagngtttcttctgatcaatcc

SEQ ID NO: 87 - DNA, 520 bp, Homo sapiens
acatccaaactactgtgtaaacacagaacacacctccaaattatgcttgtgaactaaatgtttcactaaagttcagaaaagtttacaaatttgcttatttatgacatacatttgtagatttctctaatcctttaaatcaaaagaaaaatgaacaccaataaaaaaaaaatcagaagggagaggaaaaaaaattaaatctaatggaaaatattctcttccattaatgtcagagtcaccaaaaacagacaataaaatttacacataaaattgaaaatatcatgatagtgtttacaaatgcacacaactttgagcaaagctttacaaatccttcataccatacaaagcaaatgagaaaataatgtcaattcatttctaccccaaacctagttcttaggagaaaattcgcaggaagagaggtatgagtagtttcacagaatacattttcaagaattttttaaaaactgaaactccaatgcccagaacaagataaacagtatccttagcagttagcactgttaat

SEQ ID NO: 88 - DNA, 257 bp, Homo sapiens
  misc_feature 196, 238: n = A,T,C or G
acctgtgggtttattacctatgggtttatatcctcaaatacgacattctagtcaaagtcttggtaatataaccaatgttttcaaatgtattctgtcatacaaagagcagatttttattgaacttgtgcaataactatattaccatacaatataaatattcatgaatagttttcccaagtctggagcgaccacatanggagaaaatgtaaatgcctcaattttttgttcacaaaagtanattttatcaaattgctgta

SEQ ID NO: 89 - DNA, 419 bp, Homo sapiens
acctgctaaactgttgttttgaccaagtccatgttttcaaacctgctactagcaaggcaggaaactccgaagtctatgtggtttgcctccactataaggggagagaggccatccatcctctgttatctaagatgaccttgaattttgggactgaaatgaaaaggaaagccctttttccccatcatgtgattcctgattcttttcttaagagacatgaagaatgttgtgtgttctttcataaatatcagctagagactatttctgaaaacattcgtctatttgagtgcatgggaaaggcggaacaagaaaagctgaataatttaagggattgtgctatacaatattttatgcaaaaatttcaactgaaacatctttccagaagtaattggctagtaaaaaaatctagtattggttgtagt

SEQ ID NO: 90 - DNA, 310 bp, Homo sapiens
agagccccgaattaataccaatagaagggcaatgcttttagattaaaatgaaggtgacttaaacagcttaaagtttagtttaaaagttgtaggtgattaaaataatttgaaggcgatcttttaaaaagagattaaaccgaaggtgattaaaagaccttgaaatccatgacgcagggagaattgcgtcatttaaagcctagttaacgcatttactaaacgcagacgaaaatggaaagattaattgggagtggtaggatgaaacaatttggagaagatagaagtttgaagtggaaaactggaagacagaagt

SEQ ID NO: 91 - DNA, 409 bp, Homo sapiens
acctgtgggtttattacctatgggtttatatcctcaaatacgacattctagtcaaagtcttggtaatataaccaatgttttcaaatgtattctgtcatacaaagagcagatttttattgaacttgtgcaataactatattaccatacaatataaatattcatgaatagtttcccaagtctggagcgaccacatagggagaaaatgtaaatgcctcaatttttgttcacaaaagtatattttatcaaattgctgtaagctgtggatagcttaaaagaaaaaaagtttcctgaaatctgggaaacaagacatttaaagaatcagcaaaatttcaaataaaaaattatgaaaaatattatcctcattagttcatttagtcccatgaaattaattattttctctgcttgatct

SEQ ID NO: 92 - DNA, 466 bp, Homo sapiens
acagtgaaaaacaaactaatataaagcattccagttgataaaaacctcctcaggcttatggtttgttttccaaggaaattatgtttcaatgtaaagtttgaaatactccagacatacattccatgtaggttttgggtgccaatgttaaaatttcaaattttgcatgcaaggcttagcaaagaaacactggcagaattccagcatttgcaaaattctaagttttggtgaatattgtaaatattacaattggtattagaaagccatgatgaatccagaattaagagaaaacccatttcataaatattttgtttgattaaaaaataccaggcttaccatgttctaaataactcaagaaaatatctttaaaaaaaaaaggactgcaatttaacagtaatctgtatatctttagctgccattaaaaaaagaaaaaagaacaaaccaaaaacaatgaaaatgtttacaactg

SEQ ID NO: 93 - DNA, 487 bp, Homo sapiens
  misc_feature 189, 444, 473: n = A,T,C or G
acattttatggctcccagagcatatattcagttggtgcatgttgtggaagggggaattggaaattaaatgaaaacctatgactttggtcatgtcaatctgtaagacacatcagtaaaagggtattatgctctgttggttttgtttttttgttttgcttttttttttttttttcttttttgttttttggngatgtggcttaaatgcaatagtttcttttttgggacatatttctgccaattaaagactagaagggcacaactttttttttaattaccatagagaagatacattaaaaaaatcttctgatgttttgtagccataactaaattatggtaaaaatgtgcactattgtgaaaaggagcaacgtagttttgggttttttgttgtttgtttgttttgctttgttttttaagagattaaaatgtttctggataaaggattancttctcgaagtgtccatcattctgtgtanaagcttaaatatgt

SEQ ID NO: 94 - DNA, 451 bp, Homo sapiens
  misc_feature 404: n = A,T,C or G
acgtgaaccacaaagtgtataccaggcatatgacatggatccccctggggaaccaggctgatctctttccagagggcactatccgaccagtgcatgatgatatcctcatcgctcagctgcggcctggccaagaaattgacctgctcatgcactgtgtcaagggcattggcaaagatcatgccaagttttcaccagtggcaacagccagttacaggctcctgccagacatcaccctgcttgagcccgtggaaggggaggcagctgaggagttgagcaggtgcttctcacctggtgttattgaggtgcaggaagttccaaggtaaaaaggtggccagagttgccaacccccggctggataccttcagcagagaaatcttccggaatgagaagctaaagaaggtttntgaggcttgcccgggttcgagatcattatatcttctctgttgagtca

SEQ ID NO: 95 - DNA, 107 bp, Homo sapiens
acaaaaaaagcacattcctagaaaaaggtattggcaaatagtaaaaatgggaggtcaaaagcaaaaaaaaaaaaaaaaaaaccaaaccaaaaaaagaaaaaacccac

SEQ ID NO: 96 - DNA, 328 bp, Homo sapiens
acaacagtggtttgggaatctgcaaataaatgctcatttaagaaaaactactgaatatgacagcatcagcccaaaccgggacttccagggccatccagatttgcagaaggacacatcaaaaaatgcctggactgatacaaaagtcaaaaagaactctgatgcttctgataatgcacattctgtaaaacagcaaaataccatgaaatatatgactgcacttcacagtaaacctgagataatccaacaagaatgtgtttttggctcagatcctctttctgaacagagcaagactaggggtatggagccaccatggggttatcagaatcgt

SEQ ID NO: 97 - DNA, 499 bp, Homo sapiens
  misc_feature 73, 479: n = A,T,C or G
acctaaagcacagctaggcagctggggaaaaggcagcagtggtggagcaaaggcaagtgagactgatgccttncggtcaagtgcttccagtttaaacagattctctgccctgcaacctccagcaccctcagggtccacgccatccacgcctgtagagtttgattcccgaaggaccttaactagtcgtggaagtatgggcagggagaagaatgacaagccccttccatctgcaacagctcggccaaatactttcatgaggggtggcagcagtaaagacctgctagacaatcagtctcaagaagagcagcggagagagatgctggagaccgtgaagcagctcacaggaggtgtggatgtggagaggaacagcactgaggctgagcgaaataaaacaagggagtcagcaaaaccagaaatttcagcaatgtcagctcatgacaaggctgcattatcagaaagaggaaactggagaggaagtngaaatctatcattgatgaat

SEQ ID NO: 98 - DNA, 489 bp, Homo sapiens
actcatgcccgactgtctaccaggcacacagactttgaggagagggagtatgtcgtcttgatccgcatcaatgatgggggtcggccacccttggaaggcattgtttctttaccagttacattctgcagttgtgtggaaggaagttgtttccggccagcaggtcaccagactgggatacccactgtgggcatggcagttggtatactgctgaccacccttctggtgattggtataattttagcagttgtgtttatccgcataaagaaggataaaggcaaagataatgttgaaagtgctcaagcatctgaagtcaaacctctgagaagctgaatttgaaaaggaatgtttgaatttatatagcaagtgctatttcagcaacaaccatctcatcctattacttttcatctaacgtgcattataaatttttttaaacagatattccctcttgtccttttaatatttgctaaatatttcttttttgaggtggag

SEQ ID NO: 99 - DNA, 496 bp, Homo sapiens
acaaatgatgaccaataattttatctttcttcctttgaatatactgtaaattctatgaaaaattcatttataaaaacaaagcaaagaatagcataaattttattttctttcacaatgttatattttaatagaagaaaaaaactacctttctgataactgtaacctaagtaaaacaaatattttacatataatttgaggcaaagtaatgagtttcttgaatcaactggagaaattagtcacattacctatgtcatgcataaatgatggtaagaagaaaaaaaaagcatctgatcatgtatgagaactgtctctgttcaaattatgagaaataaaatgaaaattgctaaagggagaaaatgaataaaatatgatttaaaaaaaaccatatgggaattgcatagatgagaaaaaaattttcattctagggatctaaaagtaatgtttttagctttaaaaacatacacacacatatataattgagacatgtctatcatct

SEQ ID NO: 100 - DNA, 423 bp, Homo sapiens
  misc_feature 382, 394, 398: n = A,T,C or G
accaaagcattaccgcatggtagagaacacactcgattaaaaatgttaagctatctgaaaaataaaatgtgcaagtcttcaggatggcacaaaacaaaggttaatgcttcttggggcacatttcttagagggcttgctgagtgtgtaaatataatcgacttttgtttgtgttacatgacttctgtgacttcattgaaaatctgcacaattcagtttcagctctggattacttcagttgacctttgtgaaggtttttatctgtgtagaatgggtgtttgacttgttttagcctattaaatttttattttctttcactctgtattaaaagtaaaacttactaaaagaaaagaggtttgtgttcacattaaatggttttggtttnggcttcttttantcangctttctgaacattgagatatcctg

SEQ ID NO: 101 - DNA, 271 bp, Homo sapiens
  misc_feature 165: n = A,T,C or G
gctctagagggggtgctatagggtaaatacgggccctatttcaaagatttttaggggaattaattctaggacgatgggcatgaaactgtgatttgctccacagatttcagagcattgaccgtagtatacccccggtcgtgtagcggtgaaagtggtttggtttanacgtccgggaattgcatctgtttttaagcctaatgtggggacagctcatgagtgcaagacgtcttgtgatgtaattattatacgaatgggggcttcaatcgggagt

SEQ ID NO: 102 - DNA, 527 bp, Homo sapiens
  misc_feature 12, 13, 420, 427, 452, 498: n = A,T,C or G
acatcaagtcannaatgatgttgacatgagttggattcctcaggaaacattgaatcaaatcaataaagcttcaccaagaaggttgcccaggaaacgggcacagaagagatcagtgggatctgatgagtaaatgttcctttgtgcaacaattcggtctttacttaacctgccctaatatttttcggcctgatgggaattagtgcagagaagccatgtcaccatagaaggcaactcctacttgtgtgtggactgagcaatcagagtctgtggcgataatattgctgaaaatgcactgcattcatttttctaaagtaacaaatttggttttttttttaaaccattaaaatctatgtgtgtgcgtgtgtatgtatgtgagcagttggtcttaccaagaatcattgttgagctacctgaaaacangtctttngaatactaaatataaatgctgttgnctcttcctttttgacatttttctgatttttttcccccaaaactcanttaaatatttacccactatgattattgat

SEQ ID NO: 103 - DNA, 395 bp, Homo sapiens
actcagaaaaacatctaaagctgttggagaagagggactcatataaatagttggattgcgttttgctttttatttctttataaaaatatgtcaaaaacagtttttaattttagaaatcttatacttgaaagaaacctcaattatcagtggctttatgaagtaaagttaaaaacaaacataggaaatgtgaaaatatttgtgtttgttttgtctgactaacttgctgctaaatgctatctttaggtgtgtgaaagttctttgatatgttattgtccttttacatcttgttaaatagccattgcttttgagaatcagatagtgtgttgtttaggggttaattgtgtctatatctttcaaaaacttttatattatgtattataagaagttacagtagt

SEQ ID NO: 104 - DNA, 489 bp, Homo sapiens
  misc_feature 476: n = A,T,C or G
acttgaaatttaactattaaaaaagttggaggaactcaaactttgaagttagggctccctttctccagataaagcacattgcctggtttattgtaaggcacttagaacatgtaaccaaaaacactcaatttaggaataggaatgattgttttacagctaagtgcgctctcagagtcttttgttttacacccctctcaagtttacctttagatatttttcttgttgtttaatattttgtgacagatttggcaacttttaaaaagttgtttgaattgaatagtgcataaaattaatagatgtttttcagaaaatccattattaagagtagaggaatgaggagaaatattcgttctaaagagaatcaaaaccacaatgagagattgtcttacccccgttagaatgacagttaccaaaagacagtaacaaatgctgacgagaatgcagaggcaggaacgtttaaaacactgttagtgggnaatgtagacttgt

SEQ ID NO: 105 - DNA, 462 bp, Homo sapiens
acacttttgttacagttacatatatgaatagttagcagaggagaaactcctccgttgttcctacaccaagggaaaaaatgtaaggactgtatagctcatgaataatattaacatttttctatcacaaaatattgataaaattggaattgtatcaattcatgttatggagcttaacattttagccgaaatattaagataatataaataaggcttttagcttcatatcaagacctatttgaacacttctagaaaagaacattaaaagttttttcctcatttatggtttgatttagtgtagtgcctcaactgttcttaatggtgtcttagtataatgcataattattagaatataattataaggcattacagaattttatgtggatacttgcaaagatatttcagtccaaaacttcaaattacacacccaaatatgtttgttgccttaatctatacttggacaaa

SEQ ID NO: 106 - DNA, 279 bp, Homo sapiens
acaagaaacaaatgggtgtggttgtatcccaataaaatgttagcaaaaggcctctctggcttgccaatcactgccttaaaccataaattttcatatgagcctggttttattttcatttttgttgtaataaattactcagtacaccaccattcaccacaggatttatgatttaccaattacatactccaccattttggcaaaaggatgaaattcttaaaactgtttataaacctaatatagtaaagactgtatacatctccatattgcacatttttatgt

SEQ ID NO: 107 - DNA, 411 bp, Homo sapiens
acttcatgctgtctacactaagagagaatgagagacacactgaagaagcaccaatcatgaattagttttatatgcttctgttttataattttgtgaagcaaaattttttctctaggaaatatttattttaataatgtttcaaacatatataacaatgctgtattttaaaagaatgattatgaattacatttgtataaaataatttttatatttgaaatgttgactttttatggcactagtatttctatgaaatattatgttaaaactgggacaggggagaacctagggtgatattaaccaggggccatgaatcaccttttggtctggagggaagccttggggctgatgcagttgttgcccacagctgtatgattcccagccagcacagcctcttagatgcagttctgaaga

SEQ ID NO: 108 - DNA, 210 bp, Homo sapiens
actacctgttgacctggaattttagtgattctgggaaagttttccagacaaagacaccaatagagtgaagggttttttccccaattactattttattgttttttaaaatgcctttttaaaacttgtgtgatgtggcaaaatagtcatatgttcaattaatttatattttattcattccttttcaattctggttattatgtaacctcaagt

SEQ ID NO: 109 - DNA, 475 bp, Homo sapiens
acagcattctggaataaagcaagagtgttcattcacacacacagtagcttcaaaactgttcgatctgtttgttcccatgtagttttctaaagatggaaaaaaaggactttggtcatcaagactactgtggccatattagattactggaacatctaagcatcagtgtgtgaccatgcgaacaaaagacttcggggagtgtctatttttaaaaaggtttatgtgtgtcgaggcagttgtaaaagatttactgcagaatcaagcccacttttaggcttaggaccaggttctaactatctaaaaatattgactgataacaaaaagtgttctaaatgtggctattctgatccatagttgttttttaaagaaaaaaaatgtatatacagaaagagtataaaagtttgtgaatttaatgcaaattagcttccagtcttcacttcccaaatacttgatttatagttttgactcctttacattt

SEQ ID NO: 110 - DNA, 443 bp, Homo sapiens
acaaaaaaaaccttacataaattaagaatgaatacatttacaggcgtaaatgcaaaccgcttccaactcaaagcaagtaacagcccacggtgttctggccaaagacatcagctaagaaaggaaactgggtcctacggcttggactttccaaccctgacagacccgcaagacaaaacaacaggttcttgccagcctctagagaaatcccagaacactcagccctgacacgttaataccaaggggaacagttaacttcaatacaaggtcaaaatcagcaacaagttctacaatccagtgctgatatcagatacaagcttcaaggacaatttcttttcgaaggcttattccagtttcgtgaggctagcatgaggtgtgtgcatttgccaggggcaaatttctattctcaattaacccatgcagcaaatgctacgcatctgctgagt

SEQ ID NO: 111 - DNA, 268 bp, Homo sapiens
acagttatgctcagatgaacactggacccatgtggcagggtcaagcaactagaacatgattcagaaatcagtgaaagatacacttggacaggaccaagaggcatttcactgccatgaaacaaggcaggaagggattctaatacacacaccaggaagcactcctgcccctcagaggtcaaggagctgatcctatattggtatgaggaatggcttattttctgatgaccacatgtgggactatttcaaccgccacaagaaaccccagaag

SEQ ID NO: 112 - DNA, 469 bp, Homo sapiens
actactaattaatagaaaatcattcaaccaagagaagagtcaagtgaatatcgtttgtttatttgctagtgagtttctttgtaacgttgattttattaaatgataatatttggttagtatgtcctatgttaataaaaatgaacaaaattaattttgctatgttcaggtgtcttgataaaataacaatgctccagtgttgttgcttacatttagcactaaattttaacacagcgtcagtgagtccaggttttaacttcttcatgcctggatgggataaaatgtaattcattgttaaattaattcatatttgtatttattaatcactgtgacaacattaaccatttgttcttaccaggaagtggtcagattatcatctgagttacagttagactggctaagtttggtattagatcaaggggaatgtccagtaaacagagaggtaagcatgatggaaataatgaagtggggt

SEQ ID NO: 113 - DNA, 388 bp, Homo sapiens
  misc_feature 97, 116, 145, 148, 172, 205, 212, 227, 233, 252, 324, 346,379: n = A,T,C or G
ctttttttttttttttttttttttttttttttgggggtgaggtaaaatggctgagtgaagcattggactgtaaatctaaagacaggggttaggcctntttttaccagctccgaggngattttcatattgaattgcaaattcgaanaancagcttcaaacctgccggggcttntcccgccttttttcccggcggcgggagaagtanattgaanccagttgattagggngcttanctgttaactaagtgtttgngggtttaagtcccattggtctagtaagggcttagcttaattaaagtggctgatttgcgttcagttgatgcanagtggggttttgcactgagcancgatgagagccttgaaggccctccagttttcangatacgtgt

SEQ ID NO: 114 - DNA, 195 bp, Homo sapiens; identical to SEQ ID NO: 8

SEQ ID NO: 115 - DNA, 399 bp, Homo sapiens
  misc_feature 323, 364, 365: n = A,T,C or G
acctgtgggtttattacctatgggtttatatcctcaaatacgacattctagtcaaagtcttggtaatataaccaatgttttcaaatgtattctgtcatacaaagagcagatttttattgaacttgtgcaataactatattaccatacaatataaatattcatgaatagtttcccaagtctggagcgaccacatagggagaaaatgtaaatgtctcaatttttgttcacaaaagtatattttatcaaattgctgtaagctgtggatagcttaaaagaaaaaaagtttcctgaaaatctgggaaacaagacatttaaagaatcangcaaaatttcaaataaaaaattatgaaaatattatcctcannagttcatttagtcccatgaaattaattattttct

SEQ ID NO: 116 - DNA, 426 bp, Homo sapiens
  misc_feature 1, 2, 11, 52, 103, 248, 288, 375: n = A,T,C or G
nnaaagtatgnattgaccatgagatttcccagtgtttggtgcttaatgccgnttattttatttaagctaagaatgcatatgtaacccatgcacataaccagtngctactatactaatctggttgagcatgaactgatcaagatatcaaaacttatcaaaactagcctgaagctgatgaaactgttaacccactaattgccttaatcttaaagctgttttttaagcatacttaaataatgtatgaaagnatgtataaagtttgaaggataagttattagtgttctgcanagcaataatgcctttttctatttcatcaaatcaaggtcaaaaattcatcttttcaagattaaaaagctctcttaatggaaatatttnaattttgcttatataaaaagcactatagccatgttttccaaaaagtataaa

SEQ ID NO: 117 - DNA, 215 bp, Homo sapiens
ttttttttgctctagagggggtgctatagggtaaatacgggccctatttcaaagatttttaggggaattaattctaggacgatgggcatgaaactgtggtttgctccacagatttcagagcattgaccgtagtatacccccggtcgtgtagcggtgaaagtggtttggtttagacgtccgggaattgcatctgtttttaagcctaatgtggggac

SEQ ID NO: 118 - DNA, 397 bp, Homo sapiens
  misc_feature 7: n = A,T,C or G
gtatagnatttacattctcttttaggtagaagaggcaattttacccttatttcacatggttagaaatttaaagcaagatcatttacccaaggataggtgtttggtaatgttgaaggagttagtctggcttcatgttttacatcttcaactaaaatcccatactatctgcttggatttggagagccaaaaaataaagctgattgtcatgtgattaaatatctgatcaacaggtatgaatataacttaaatcagcatatttttgccatggtaataaattgtcctataaactatttatatatttttgttcttcataattatcactaataagcatcagtttgttgtttttaaaaggatatttaagtgagcattttctagttcatatgaaaataaccatagt

SEQ ID NO: 119 - DNA, 356 bp, Homo sapiens
accaagtattccagtggaagatgatgaaagccagaataacaatttactaccttctgatgaaggcctgaggatagacagaatgactcagaaaactccttttgaatgcagccagtctgaggttatgtttctgagcttggacaaaaagccagagagcaagagaaatgaggaagcttgcaacatgcccagttcttcttgtgaagaaagttggttcccaaagtatatagttccatcccaggacttaaggccctataaggtaaatatagatccttcttcagaagctccagggcattcttgcaggagcaggccagtggagagcagctgttcctccaaattttcctgggatgaatatgaacagt

SEQ ID NO: 120 - DNA, 294 bp, Homo sapiens
  misc_feature 195: n = A,T,C or G
actcaccaggggtgtggtcctatgggtgacattcttgctccatcatttcttacccaggtaaccttgagtatggcgcctaaatcctctcttcctttcaaattgcctggtctgtaaaatggatgcagtgaatggtagctatgccacaggtgttttgtgtgagaattaaatgagaggagttatatcaataacacttanaggcatgcggtgcctatagtgagggcttgttttatgttgtcgtttaaccctttctttctcagccctcccccactccacatcccctcccactggcaatgt

SEQ ID NO: 121 - DNA, 467 bp, Homo sapiens
acaaagcagcaactgcaatactcaaggttaaaacattagaaaagcatttgtgtgacaggtatattacagtattatcaaaatattacattttcagacttacttagcagataatcatccaccagagcttaaatctttaaattatttccatagtcttaaaaaatatgtaatgtcagaatgcatataaaaagaatgtaaaaggaaacctaaaatacaaatggaataatgtaacaaataaatatttgatttcagtaactgttaataatcagctcaacaccaccattctctctaaactcaatttaattcttataggaataatgaactgtcaaatgccatggcataattatttatttccaagctatcatcaatgattagaactaaaaaaaatttggcataaaaaaatcacaattcagcataaataaagctatttttagcttcaacactagctagcatctctaagaattgttgaa

SEQ ID NO: 122 - DNA, 375 bp, Homo sapiens
acgactttttcgagttggcttaggcagaattctcctctgagcgataaagacgacatgcttcccactgaactttttctccaattcgcgtaaggctcagaaaaatcctgcgaagaaaaaaacttctgaggtaataaataggattatcccgtatcgaaggcctttttggacaggtggtgtgtggtggccttggtatgtgctttctcgtgttacatcgcgccatcattggtatatggttagtgtgttggttagtaggcctagtatgaggagcgttatggagtggaagtgaaatcacatggctaggccggaggtcattaggagggctgagagggcccctgttaggggtcatgggctgggttttactatatgataggcatg

SEQ ID NO: 123 - DNA, 451 bp, Homo sapiens
actatactctgtattctcacaaatagagaagactaatattgcagacctggtgacagctctgattgtccttttggttgtatccattgttaaagaaataaatcagcgcttcaaagacaaacttccagtgcccattccaatcgaattcattatgaccgtgattgcagcaggtgtatcctacggctgtgactttaaaaacaggtttaaagtggctgtggttggggacatgaatcctggatttcagccccctattacacctgacgtggagactttccaaaacaccgtaggagattgcttcggcatcgcaatggttgcatttgcagtggccttttcagttgccagcgtctattccctcaaatacgattatccacttgatggcaatcaggagttaatagccttgggactgggtaacatagtctgtggagtattcagaggattttgctgggagtacctc

SEQ ID NO: 124 - DNA, 495 bp, Homo sapiens
  misc_feature 395: n = A,T,C or G
accctcttcaagaatcggatggatgtcgttttgaagggcgacaatcttcctcagtatagaggggtgaacattcggagattgctcaacggtagcatcgtggtcaagaacgatgtcatcctggaggcagactacactttagagtatgaggaactgtttgaaaacctggcagagattgtaaaggccaagattatgaatgaaactagaacaactcttcttgatcctgattcctgcagaaaggccatactgtgctatagtgaagaggacactttcgtggattcatcggtgactccgggctttgacttccaggagcaatgcacccagaaggctgccgaaggatatacccagttctactatgtggatgtcttggatgggaagctggcctgtgtgaacaaagngcaccaaaggaacgaagtcgcaaatgaactgtaacctgggcacatgtcagctgcaacgcagtggcccccgctgcctgtgcccaaatacgaacacacactg

SEQ ID NO: 125 - DNA, 277 bp, Homo sapiens
actgtgggttgggggccttggatcccaaataaatgagtagttcctctgcagtctaagctgaggcatggatcagggctcagggaatgggagtgaggtgagtggcaggggagacacggggtatttttggcaaggcagtgtgtgtggctgtgtgtgtctgcacgggactcaagagacccactggggggctgtgcgtgtgcatatgcgtgagatacacaggtgaattctaacaggccgtgtgtgtgagcgagcacgtgttgggacctcagatcctgagggt

SEQ ID NO: 126 - DNA, 229 bp, Homo sapiens
accttgcagctgacagataataggcaggacatgttagttataaagtagttacagcctaattcacaaaagttaccaactgtttctctttctagaaagaagcaagaagttaagaaattccttgaattagcgcctggtgtgtcaggtgggagtgcagaggagggctgttagagcagtgtcaaaaggaccctggtgggccagacgggttggacatcgttaataatcatagttg

SEQ ID NO: 127 - DNA, 493 bp, Homo sapiens
acactattacaaagtagtggttctctgtatgtctatgtgtatatatgtatatataaaactatacagatacatgtgtgtatataaacatacatatgtatatatacacacatatacttaattttaaagttaatcaaatggttatcaaaaattaatatacaacaaagattcctgggaaggtaatgcttatataaaataaggccatgtttctaaaaatccctcaaatcagtccaagataagatttttaatgaagaacataaaggttaaagaaattctttctctccaggttagctgtttttccctacttgttttcttcttgctttttcctgttgttgtccatattaaacttctttgtgctcttaaaggcccgccatcatgtgaagtggccacgccccttatggacaaagtcaagccaccaactcccaaatgtatcagtgcagctgcttcagaggaaatcactgaaaaataaagaaaaaccatccatgcatggctgcat

SEQ ID NO: 128 - DNA, 181 bp, Homo sapiens
cgcctgcccagtgacacatgtttaacggccgcggtgcctctaatactggtgatgctagaggtgatgtttttggtaaacaggcggggtaagatttgccgagttccttttacttttttcaacccaacacaggcatgggttgacagtgagggtaataatgacttgttggttgattgtagatatt

SEQ ID NO: 129 - DNA, 491 bp, Homo sapiens
ttttttttagaggagacacctgctaggtgtaaggagaagatggttaggtctacggaggctccagggtgggagtagttccctgctaagggagggtagactgttcaacctgttcctgctccggcctccactatagcagatgcgagcaggagtaggagagagggaggtaagagtcagaagcttatgttgtttatgcggggaaacgccatatcgggggcaccgattattaggggaactagtcagttgccaaagcctccgattatgatgggtattactatgaagaagattattacaaatgcatgggctgtgacgataacgttgtagatgtggtcgttacccagaaggttgcctggctggcccagctcggctcgaataaggaggcttagggctgtgcctaggactccagctcatgcgccgaataataggtatagtgttccaatgtctttgtggtttgtagagaatagtcaacggtcggcgaacatcagtgggggtga

SEQ ID NO: 130 - DNA, 413 bp, Homo sapiens
acaaaaaacccttgagattaatttttttctaaaagaagaccttaccaaaaataacttttaaaaaatctgtcaaaccatatgatagacctgaatattttccttaagactgtaaactttttttctgaaaacaattataaaaaagtagtttataagtaggattatttttctttaaaattttccaagatcatattacttgacaaataagtgtcattttgaaatttaaaacatgattttttcctaataaaattattagttattctgacatcttattaacagatcttagttgaattccacttaatttccctggggacagctgagacactgcatttttccaaatagtcttaaaaagttaaagataggcattatttaaaggagtgtcttacagtgaaaaaaagaaatcattcaaagaaaac

SEQ ID NO: 131 - DNA, 203 bp, Homo sapiens
accgctgcgttactcggaaccgccgggccgaacagcatgacgtccgctttggagaactacatcaaccgaactgttgccgttattacatcagatgggagaatgattgtgggaacactgaaaggttttgaccagaccattaatttgattttggatgaaagccatgaacgagtattcagctcttcacagggggtagaacaagtggt

SEQ ID NO: 132 - DNA, 256 bp, Homo sapiens
acctgtgggtttattacctatgggtttatatcctcaaatacgacattctagtcaaagtcttggtaatataaccaatgttttcaaatgtattctgtcatacaaagagcagatttttattgaacttgtgcaataactatattaccatacaatataaatattcatgaatagtttcccaagtctggagcgaccacatagggagaaaatgtaaatgtctcaatttttgttcacaaaaagtatattttatcaaattgctgta

SEQ ID NO: 133 - DNA, 535 bp, Homo sapiens
acagagcccgaccccctgcttgccactctagaaaagcaagaaattatagagcagcttctatcaaatattttccacaaggagaaaaatgagtcagccatagtcagtgcaatccagatattgctgactttacttgagacacgacgaccaacatttgaaggccatatagagatctgcccaccaggcatgagccattcagcttgttcagtaaacaagagtgttctagaagccatcagaggaagacttggatcttttcatgaactcctgctggagccacccaagaaaagtgtgatgaagaccacatggggtgtgctggatcctcctgtggggaatacccggttgaatgtcattaggttgatatccagcctgcttcaaaccaataccagcagtataaatggggaccttatggagctgaatagcattggagtcatattgaacatgtttcttcaagtatacatggaataactttttgcatacacaagtggaaatttgtattgcactgattcttgcaagtccttttgaaaacacagaaaatgcc

SEQ ID NO: 134 - DNA, 363 bp, Homo sapiens
actgaaaacaaatgcttagaggggtgttacttaagccctctactgttaacctacattgtgcactttttttttttgaaacggagcctcgctctgtcgccaggctggagtgcagtggtgcgatcttggctcactgcaacttccgcctcccaagttcaagcgattctcctgcctcagcctctcgagtaactggggctacaggtgggcaccaccacgaccagctaatttttgtatttttagtaaagatggggtttcaccatgttggccaagatggtcctgatctcttgacctcgtgatccgcctgcctcggcctcccaaagtgctgggattacaggcatgcgccactgcgacaggccgttgtacctc

SEQ ID NO: 135 - DNA, 493 bp, Homo sapiens
  misc_feature 17, 72, 462: n = A,T,C or G
acatccagcagctctgngaggacattatccaactgaagcccgatgtggtcatcactgaaaagggcatctcanatttagctcagcactaccttatgcgggccaatatcacagccatccgcagagtccggaagacagacaataatcgcattgctagagcctgtggggcccggatagtcagccgaccagaggaactgagagaagatgatgttggaacaggagcaggcctgttggaaatcaagaaaattggagatgaatactttactttcatcactgactgcaaagaccccaaggcctgcaccattctcctccggggggctagcaaagagattctctcggaagtagaacgcaacctccaggatgccatgcaagtgtgtcgcaatgttctcctggaccctcagctggtgccagggggtggggcctccgagatggctgtggcccatgccttgacagaaaaaatccaangccatgactggtgtggaacaatggccataca

SEQ ID NO: 136 - DNA, 516 bp, Homo sapiens
caagaaccgcttgtagtttggtttaaattctgcacgggaggaccttctgagtttacctgttgggctcctggctgcgcaggcacagcagctacacagaagagatgggagaagaggctaatgatgacaagaagccaaccactaaatttgaactagagcgagaaacagaacttcgctttgaggtggaggcatctcagtcagttcagttggagttgttgactggcatggcagagatctttggcacagagctgacccgaaacaagaaattcacctttgatgctggtgccaaggtggctgttttcacttggcatggctgttctgtgcaactgagcggccgcactgaggtggcttatgtctccaaggacactcctatgttgctttacctcaacactcacacagccttggaacagatgcggaggcaagcggaaaaggaagaagagcgaggtccccgagtgatggtagtgggccccactgatgtgggcaagtctacagtgtgtcgccttctgctcaactacgcag

SEQ ID NO: 137 - DNA, 340 bp, Homo sapiens
  misc_feature 173: n = A,T,C or G
gtcatggaggccatggggttggcttgaaaccagctttggggggttcgattccttccttttttgtctagattttatgtatacgggttcttcgaatgtgtggtagggtggggggcatccatatagtcactccaggtttatggagggttcttctactattaggacttttcgcttcnaagcgaaggcttctcaaatcatgaaaattattaatattactgctgttagagaaatgaatgagcctacagatgataggatgtttcatgtggtgtatgcatcggggtagtccgagtaacgtcggggcattccggataggccgagaaagtgttgtgggaagaaagttaga

SEQ ID NO: 138 - DNA, 320 bp, Homo sapiens
acaattataggattgtaatctaaactggaatttttaggcagtaagtcaccacaaaatgttttagataagacacaataaaattattataaataaaagcttaatgtttgtaaaaaatctcttttttagtatttcttttttcacatgaaagaagtggtggctgctaaaaaaaaagctacagtgtttattaagggtcgttttgatttatgtaaatatttgtaaattggtcagtgcctgtaaatttaaatataaaaagtaaccttgaaaacagttttaactttttcaaaagaactatgtccaacattttttagacctgctgtagt

SEQ ID NO: 139 - DNA, 466 bp, Homo sapiens
cccggagcacggagatctcgccggctttacgttcacctcggtgtctgcagcaccctccgcttcctctcctaggcgacgagacccagtggctagaagttcaccatgtctattctcaagatccatgccagggagatctttgactctcgcgggaatcccactgttgaggttgatctcttcacctcaaaaggtctcttcagagctgctgtgcccagtggtgcttcaactggtatctatgaggccctagagctccgggacaatgataagactcgctatatggggaagggtgtctcaaaggctgttgagcacatcaataaaactattgcgcctgccctggttagcaagaaactgaacgtcacagaacaagagaagattgacaaactgatgatcgagatggatggaacagaaaaataaatctaagtttggtgcgaacgccattctgggggtgtcccttgccgtctgcaaagct

SEQ ID NO: 140 - DNA, 489 bp, Homo sapiens
acccaaaatcccacaataaaaaaatcatttaaagctgtgtgtttcaaacttatcacttagaaataaaaacaaaacaaaacataaaaacaaagatcagtttgcaacataatttaaagaagcttctggtttaaaataccacagcagcaatataaagagctggtggcaatcacattcgggagtgaaatcgaaatcaatatattttgtccacatcagcatccaattacagtagttgttaaattcaatccaaaaagttattgctgaatttgtggcatggaatttgagaagatagtattgttcagcagcacaaccacagcagtaaaaatgagaacaggaggatttcattgcttttgagagctaaagggaccgtgaggaggatatcttgctgattgcctgaagataatcctcagttacattcctgcatattacctgctttaaataaatgcaaatgacaaccaccttttcaggaggggcataataatgtaatccaga

SEQ ID NO: 141 - DNA, 351 bp, Homo sapiens
gccaggtggtcagctttaaagctgtgaagatggtggaagctaatgtttctccagatactgctttctgacctagagccctgagtatttttcctatctcccttcctaaccttcttcactgaatttaagttgcagggccatttatggccatctatacactttctctttgcagcagggaatgtcactgtatcccccgtggtagcagtaatttgggcttttattagcaaagaagattatagggtggatgctgctggagtggtaattgcacttcagaccctgttgaaattcagtaactggaagaatctctttttgagctcagagtcctcttggtgtggaaggttcataggtcattgt

SEQ ID NO: 142 - DNA, 406 bp, Homo sapiens
  misc_feature 297, 352, 395: n = A,T,C or G
ggaaaacccggtaatgatgtcggggttgagggataggaggagaatgggggataggtgtatgaacatgagggtgttttctcgtgtgaatgagggttttatgttgttaatgtggtgggtgagtgagccccattgtgttgtggtaaatatgtagagggagtatagggctgtgactagtatgttgagtcctgtaagtaggagagtgatatttgatcaggagaatgtggttactagcacagagagttctcccagtaggttaatagtggggggtaaggcgaggttagcgaggcttgctagaantcatcaaaaagctattagtgggagtagagtttgaagtccttgagagaggattatnatgcgactgtgagtgcgttcgtagtttgaagtttgctaggcanaatagtaatga

SEQ ID NO: 143 - DNA, 286 bp, Homo sapiens
actaaagaggaagcaattgagcacaattatgggggtcacgatgacgacctgtctgttcgacactgcactaatgcttacatgttagtctacatcagggaatcaaaactgagtgaagttttacaggcggtcaccgaccatgatattcctcagcagttggtggagcgattacaagaagagaaaaggatcgaggctcagaagcggaaggagcggcaggaagcccatctctatatgcaagtgcagatagtcgcagaggaccagttttgtggccaccaagggaatgacatgt

SEQ ID NO: 144 - DNA, 400 bp, Homo sapiens
actaaaaatcaattggatgaactaaatccaaaacatgacactgtaggcagcagttttaagtcttatttttactgtttatatatttgaatgctgctacaacagatgatcttcatccctgaagttttcagctaaacttggtttcctagaatagactgttaactttcaaaatttttattggtgaaatggaaatactgtttttccttgtgaatgaattttcatatttgtaagtgctaagtttataattcaggtttgatcaaggtgtgaataactgaagaaaataacttgctggctatataggaaaatgctgtggaaatgaactgtgtatatacttctgggaggaacaaatttaatcatttcttctgttaagcactaatcagtatagtgcaactcctggttctgt

SEQ ID NO: 145 - DNA, 485 bp, Homo sapiens
  misc_feature 140, 141: n = A,T,C or G
accaacataatacacctttcatattatgtattatcttgcttaatgggttttatcttgattatccagttacttccatcctcttcccaatgttaatttgcaatagttttaaaatgggaacaaatgaatcaatcatcagatanntaaaatgaaattaaatcagctgcctaataatttatggaattcattggaatgtgcttaaaatgctaaagtgtatgtcattgaacatgaaatcttttttcaggcacatacattgttggtattgatgactttttaaaacctgtgggataaacttgcactgcacacggaagttttattcttgtatatttagatttgtatgcttgtgagtaaaaatgtgcatttgtaaatactgtgttttttaggttgaatcaattaagtcttaaaactgtaaatttattaagcttgttgccagtaggtttaaagaaaatcatgatctcacatgcctcactttgacatttatcatgcct

SEQ ID NO: 146 - DNA, 195 bp, Homo sapiens; identical to SEQ ID NO: 8

SEQ ID NO: 147 - DNA, 483 bp, Homo sapiens
  misc_feature 404: n = A,T,C or G
actaacaatgtattaatagaaaggatgacatctaggtgtatagcaattaaatgacttaaatgagttaataaatgtaaaacacagaaaactatctggccccctccatactgttagttgctgttgttgttattcttttaagtgaaaatttttaaaagcatcttttgctgctagactatctgggttcaaatactggtcctgtcactccctaatggtgtgatcttgggccagttatcaaaccttaccaagttctaatctgtagaatgtggataatagccttagtctcagagagttgttgtggggattaaatgagataaagacacaattaaatcagataatggagatcataggagatgcttgaacccagtaggtgctaacctattatttgccttcctacaagtctgcanggagcgatcaactgagtgaaaagcctagaaatcattccacaggaaggacatgaaaaaaatggagcatgaagctgttttt

SEQ ID NO: 148 - DNA, 348 bp, Homo sapiens
acctaaaatggatttgactatattcaagccactttcatatattaactagataaaaggataccatactgctatttgaaattcaatcacaaagcaaaaatgtcataattttaatgtattttaagggaagacggggttcttaacatgaatatgtaatacaaaaacaattctaaataataatatttaatagaagaaaaaatctgtataattatttagaagtaactctgtttttaaaatttcaatgttaggaagaaaatcccttaaatttgaaatagcggaatattctctcatatgaaaaaactgtgtcccagtgttattcttcaacttagaaattaggcaaagtattttagt

SEQ ID NO: 149 - DNA, 289 bp, Homo sapiens
acttgttcctactattatttttgtatatgaagaactggctttggatttaactgaaaacttaggaaaacaatctaatcgctgttgtctatatcattgatttaattcatcaaagttactcaaatgattgatatttttacttgctaattattttaggagtgattttgtgaaatttatttttaatacagtcctagaattgaattgaaatatggtttggaagtttgagggttttttactgtgtctatccttgtgtgtctgtttcctttaaagattcatgatacaatcactgtgt

SEQ ID NO: 150 - DNA, 243 bp, Homo sapiens
acaatggaatatcattcagccttacaaaaggagatgctgctatatttgcaataacatgggtgaacctggaggacgttacgctaagtaaaataacaatattgaaggaaagaaataatactgaaagaaaaatattgcttgatctcacttatatatggaacttaaaaactacacatagaaacagggtagaatggtagttatccaggctgggaggaagagaaaacagggaggtgtaggtcaaagggt

SEQ ID NO: 151 - DNA, 185 bp, Homo sapiens
  misc_feature 9, 10, 12, 88, 179: n = A,T,C or G
ttttttttnntnttgaaaaagtcatggaggccatggggttggcttgaaaccagctttggggggttcgattccttccttttttgtctanattttatgtatacgggttcttcgaatgtgtggtagggtggggggcatccatatagtcactccaggtttatggagggttcttctactattangacttt

SEQ ID NO: 152 - DNA, 493 bp, Homo sapiens
  misc_feature 11, 12, 385, 465: n = A,T,C or G
accagtgtggnnaaatgggctggttaactgtgtgggcccagacagtcatttgtctatattcctagtgatgagaaattattccccctaaccttccaatgaaacaagtgtccacatagttctcatttttccctattgttgaaacattagtgagagggacccatgcatgttattaaaaattaagttcaaaacacttaaaataattctgtattagaaacttgactctatcataagtctcttcttttggaagtcatactgggctggttaaatgctccaattccattgttattaacatttaggaagcagaagactattccagctagttcaaactagaggtttagttactacaacactgattcctggttggttgtgtgggttcggtaaggtntactcctcttcctctggcagaatttgctcctggatttttgtggttcattctttggcaattttttagctattgccatgaanatttcatttacattcattgatgttttag

SEQ ID NO: 153 - DNA, 163 bp, Homo sapiens
  misc_feature 101, 136: n = A,T,C or G
acagtggcctgttatctttttaatgaatatatacaagccaacatccaatttctattattacaattagggttcttgtagctgtttatgttaatatggagaanaaaactatattggctgattttttctgatcttaaancagaataccttttctttttttgcttca

SEQ ID NO: 154 - DNA, 362 bp, Homo sapiens
  misc_feature 193, 194, 308, 323, 336, 337: n = A,T,C or G
acagaactcacacgaaaaaagaaattaaattttagctttctggagagcagcccctctctggcaccatcaaacacttctttgtttcccttcaacttggaactcttcaaacatcaggggttgtgagggtttggccattcttttatcttgggtccatgtgagtgacagaaatggtgcggcctgggaaagatcttgnngagagatccctggcccaggacaggagatgccaaatctaatttatctcactgagggcctttgagaaaaacgcttcctgggccaggctcagtggctcatgcctatataatcccagnacctgcccgggcggncgccgggcaggtnntaatttgattcctccatccttgaat

SEQ ID NO: 155 - DNA, 213 bp, Homo sapiens
acacatctattttttatactttttttttaaaaaaagaatgtcagttgttatttattcaaattatctcacattatgtgttcaacatttttatgctgaagtttcccttagacattttatgtcttgcttgtagggcataatgccttgtttaatgtccattctgcagcgtttctctttcccttggaaaagagaatttatcattactgttacatttgt

SEQ ID NO: 156 - DNA, 165 bp, Homo sapiens
acaatgatagtgccgggttggcagttaactctttcaccctactaaattcaagagctcatctccaccctgtcctgtatattttctacatttctattaagaggctacttggtagtgtcagcgggcatcttttacaccttctagtagctcaagccagtaaaaccttgt

SEQ ID NO: 157 - DNA, 406 bp, Homo sapiens
  misc_feature 12, 13, 49, 50, 74, 75, 85, 86, 196, 206, 300, 303: n = A,T,C or G
accacatacctnngtttcagaaaccacccattctacattaaaatctaanncctttatcatctatggctctttgnnattatagaanntctacataggtatttatttgcctttcttcctatcaatcagatttatttattttaaaagcccttgataagtagtaaaatatttaactgcttttcttaaccatacaagtcanaattagattntaaaattctatgaaaaatttttggataacaaatctaactagagacttaatgatttgtgttaggattctgtgagccatacttcagcttattattngtntctcagcaatccccagatttgattgtcttgttctaccagagtaagcttaaccagtttttattatctaaaatgcttaataagtgccccctccccgccaagtgat

SEQ ID NO: 158 - DNA, 341 bp, Homo sapiens
acagggtttactctcagaaacctacctggaagcccatcggattgtgaagatgaacaagagtgaggatgatgagtctggggctggagagctcaccagggaggagctgaggcaaattgcagaggaggatttctacgaaaagctggcagcttcaatcgccccagaaatatacgggcatgaagatgtgaagaaggcactgctgctcctgctagtcgggggtgtggaccagtctcctcgaggcatgaaaatccggggcaacatcaacatctgtctgatgggggatcctggtgtggccaagtctcagctcctgtcatacattgatcgactggcgcctcgcagccagt

SEQ ID NO: 159 - DNA, 540 bp, Homo sapiens
  misc_feature 516: n = A,T,C or G
acgtagtctaggccatatgtgttggagattgagactagtagggctaggcccaccgctgcttcgcaggcggcaaagactagtatggcaataggcacaatattggctaagagggagtgggtgttgagggttatgagagtagctataatgaacagcgatagtattattccttctaggcatagtggggaggatatgaggtgtgagcgatatactagtattcctagaagtgagatggtaaatgctagtataatatttatgactactaaattaataaatttattccacttttgaaatgacagccaaaaatccacctaattgattctcatttggcacgttcttctcaattctgttcactaaattaaaattactaaatttaaactgccaagagccatgatgttgtctgcacaagacaacattttccatcactttcagaaagttatatttggcatgttaaggaaaaaaaatataatcccacagcagcagctatttaaaataagacagccaacaggattcatgcanaaatatttttaaatattcctgttg

SEQ ID NO: 160 - DNA, 235 bp, Homo sapiens
acttaagcatttccacttttggaagaaaagtgtattagtattttatattgcatttcatttaaaaggacagtttttttttttgtaaatccattcattgaaatggtttctaaactgtataatgtaatttggagcctatttagtaatagaattaaatgtcctatgtagtgctacaatttttgaattagaaagtgatcaaaagtaaaaaaaaaaaaaaaaaaaaaaaaaaaaaagcttg

SEQ ID NO: 161 - DNA, 259 bp, Homo sapiens
acgtgaaagtgctcatccaggtgggatatgagcctcttcctccaacaataggacgaaatatttttgggcggcaagtgtgtcagcttcctggtctctttagttatgctcagcacattgccagtatcgatgggaggcgcgggttgttcacaggcttaactccaagactgtgttcgggagtccttggaactgtggtccatggtaaagttttacagtattaccaggagagtgacaagggtgaggagttaggacctggaaatgt

SEQ ID NO: 162 - DNA, 313 bp, Homo sapiens
actctataaatctagtggaaacatttctgcacaaactagattctggacaccagtgtgcggaaatgcttctgctacatttttagggtttgtctacattttttgggctctggataaggaattaaaggagtgcagcaataactgcactgtctaaaagtttgtgcttattttcttgtaaatttgaatattgcatattgaaatttttgtttatgatctatgaatgtttttcttaaaatttacaaagctttgtaaattagattttctttaataaaatgccatttgtgcaagatttctcaaaaaaaaaaaaaaaaaaaaa

SEQ ID NO: 163 - DNA, 532 bp, Homo sapiens
  misc_feature 520: n = A,T,C or G
acataatcgttttgtggagtcggcacagttcaggttatggaggcacgtaattcaccaaagtgcaaaaaaggcaaaggaaaacacactgcattgtagaataaggcattcaaatgtgctgttaacgtttaaggcagctaatggccaaaacaggcaagtcaagaaaagtggtctggtttggaggtgattttgcatctagaaggcattctcttctcgtgacctcaaagactgagcactgtagagcatgtcttcttcctcaaggccaatgatacttcagataccagatggtttcatttttcaattgcggtccaaagagagggttgagttgggccagaattgcaatcagccaaaagagatagcagcaaactgaacaggtcaccaacatggtaatgataactccccggttaggacccttagggatgaaccaaggtaccaagaagccgacgaagccccagaacacgctcatcacaatgagaggcacagtgaggccgtgatacgccatggtcgccgcctgagcgccaanccctaccccgtc

SEQ ID NO: 164 - DNA, 554 bp, Homo sapiens
  misc_feature 485, 500, 516: n = A,T,C or G
acaggtgactgaaatgagccctgcggggagcccagctgcccaggccaccgtcccagtcaccatcaggattgtggacctcaacaaccacccgccaacattctatggagagagcggaccccaaaacaggtttgagctgtccatgaatgagcacccaccccagggagagatcctgcggggcctcaagatcaccgtcaatgactccgaccagggagccaatgccaaattcaacttgcagctggtggaacccaggggcatcttccgagtggtcccacagacagtcctgaatgaagcccaagtcacaatcattgtggagaactcagctgccattgactttgaaaagtccaaagtattaaccttcaagctcctggctgttgaagtgaacaccccagagaagttcagttccacagcggatgttgtgatccagctcctggacaccaatgacaatgtccccaagttcgactccctctactacgttgccaggattnctgagaacgccccanggggctccagcgtggngggctgtcacagctgtggatccagatacaggaccctgg

SEQ ID NO: 165 - DNA, 170 bp, Homo sapiens
acatgtctagcgcctggcagaggggggcagcagggcagcagcgggctggagccagccctatttgtagaggatatcgtagtgtccaggccggtagagaaggtagaccttgggctcggagccctcagggaagatgtgcggattggtggtgccgccctcgccgcggtccatgt

SEQ ID NO: 166 - DNA, 95 bp, Homo sapiens
actgtgagctttcataaggttaatgattgaggatgccagtgaagggtgcagggacaaaacctaatagtcttggatggtggggggaggatggccac

SEQ ID NO: 167 - DNA, 462 bp, Homo sapiens
  misc_feature 379: n = A,T,C or G
tcgagcggccggccggcaggtactccagatctctttcggcttcctatgagaaacaccagaagcattactttccacttctacttacagtaattgcaagaggagacctcacattcaggactggcctagtgaacgtaatccatgctttaaactggccattaaacagtcccacatggttggattttttttttttttttttgagttgtgctttcacaaaaccttgtcaaagacctcatgcaatatcactttgaaagttattttctgtttactacacaaacattgtaatataactgttaatactatttatatatttgaaaggtataaaaggtaggagttaaaaaaaaaacctctatgtgtagatattaactcagaacttacaatntacagggagaagacatgttgcaatacaagctaattctagctgctcagtaacctctggagttttttaaagggacattttcctgt

SEQ ID NO: 168 - DNA, 516 bp, Homo sapiens
  misc_feature 15, 16, 479, 486: n = A,T,C or G
actcgggaagctggnncgggccggcggtgcagtcacgggggagcgaggcctgctgggcttggcaacgagggactcggcctcggaggcgacccagaccacacagacactgggtcaaggagtaagcagaggataaacaactggaaggagagcaagcacaaagtcatcatggcttcagcgtctgctcgtggaaaccaagataaagatgcccattttccaccaccaagcaagcagagcctgttgttttgtccaaaatcaaaactgcacatccacagagcagagatctcaaagattatgcgagaatgtcaggaagaaagtttctggaagggagctctgcctttttctcttgtaagcatgcttgtcacccagggactagtctaccaaggttatttggcagctaattctagatttggatcattgcccaaagttgcacttgctggtctcttgggatttggccttggaaaggtatcatacataggagnatgccangagtaaattccatttttttgaagatcagct

SEQ ID NO: 169 - DNA, 509 bp, Homo sapiens
actaatgtgatcacagaaaaatagcaaactgaagtcaaaaagcacaggctgcccatcatagagtccccagtctatttaatattttcgacctgctctgaggatggagggtgtcaacaccttagaataccatgatgggctttaaaactgggtaaagaatcatccctagggttagggcaaatgtaacttcacttattgcttacacacagggaaaaaatctgtttccttttccaagatattcttttaaggattacttgacagtggttcttttaaaggtatcaaaagatgtcctaaaaaaaaaaaaaccctctttggaattctctcggaattccagaaagattatctggcaattcattcctccaccccatcaaaatttttcctttgaaaaattacaactggcaactcacataagatttaatcaacttacttaaaataagggagggcttctcaataatgttttccccactagaaaactaagaaattcagtgatactcagtgccagtaattaagtg

SEQ ID NO: 170 - DNA, 230 bp, Homo sapiens
acagtgtgatgatactaaaccagctagggtagaagcacttgctttctctcagcaaggcatgtgctgcatagcctctttgaaagacagaagaataaattacaaagataaattaagcaggatctttgatttgaactcataacctggtaggggagccagatacattaatgaatggtaaaatatcatagtagaggtttgtagaaaagacatggcagctccagcaagagagcagt

SEQ ID NO: 171 - DNA, 571 bp, Homo sapiens
  misc_feature 502, 510, 513, 533, 548: n = A,T,C or G
acttcagttggtgcacaaaatactgtcatttgctcaaagcgtgagtaaaatatcctaattacctgtaagctttattttgacttaatacttctttaattgatgtgccttgagttggaaagagttttattggcttaaatctgaatcatgttacaaagtaagtgtgggaacacataaatttcaaataatctttgaccccggaactttagagttaatttttttttcccgtaatcatgaaatcagttatttttcagtttggcattaaggtttctttttcagtgactgccaaatgtttggtgatgaaggcagaaatgaatggctcaaaacttgggagaagagcaaaacctgaaggggccctccagaacaatgatgggctttatgatcctgactgcgatgagagcgggctctttaaggccaagcagtgcaacggcacctccacgtgctggtgtgtgaacactgctggggtcagaagaacagacaaggacactgaaataacctgctctgngcgagtgngancctactggatcatcattgantaaaacacaaagcangagaaaaccctatgataataaaa

SEQ ID NO: 172 - DNA, 335 bp, Homo sapiens
acacgacataaggccttttataaatagctttgcttttctcatttcactagtaaacagtgaaaaaatctttatagaagctagttttctataaagtgaaggcagacctagtatattgatctttaaatgaaaccaatttaaactttcaatgacatgaactataattttgcaaaagaatttatacttaatttaccatgtgtgtggatggatttttaaaaatatataagcagattacatatgttgcttatgtataatcactggatgcatgcacaatgaaataatgcaaaagtccataggaaaatagcacttccaactccaaaaaggtgattggcaatggt

SEQ ID NO: 173 - DNA, 233 bp, Homo sapiens
acactcttttctctccctgttttgcagcaacaaattgcgaagtgcttttgtttgtttgttttcgtttggttaaagcttattgccatgctggtgcggctatggagactgtctggaaggcttggaatggtttattgcttatggtaaaatttgcctgatttcttacaggcagcgtttggaaaccttttattatatagttgtttacatacttataagtctatcatttaaagacatgt

SEQ ID NO: 174 - DNA, 490 bp, Homo sapiens
acacttttgctgagagctacaaaaagaagataagccccaaggaagaaattagcctgagcactgtggagttaagtggcacggtggtgaaacaaggctacctggccaagcagggacacaagaggaaaaactggaaggtgcgtcgctttgttctaaggaaggatccagctttcctgcattactatgacccttccaaagaagagaacaggccagtgggtgggttttctcttcgtggttcactcgtgtctgctctggaagataatggcgttcccactggggttaaagggaatgtccagggaaacctcttcaaagtgattactaaggatgacacacactattacattcaggccagcagcaaggccgagcgagccgagtggattgaagctatcaaaaagctaacatgacaaggacctgagggaaccaggattcctccctcctaccagatgacacagacaagagttcctggagaatgggagtgttaagacttttgact

SEQ ID NO: 175 - DNA, 498 bp, Homo sapiens
acagttaacattgtgcaattggaatgaccaagatactagtaaatcctttggtgatcacataagtgtaatcttccccactttataccagaagactaaagctacagtttaaaagttcatttgaagttttgttttgctcagtggcaaagatcaaatgggaccatccctctccctgttgaccactctaattgagtcctgagtggaaaaagcttaaatataaagggtttggcaacttttagaagaaggagactcttgaaagaaggttaccaggaaaattgaggattaaaaagatttagaaataatagctatcaaattcgaatttgagaatattaattttgacttaaaagcataatacacgagtccccaatgcaaatatgcttaatccctcactctatacatacttatttacacttcttgttcctttttaagaagtgaatgtagttaagaaaaatgttaaatgtaaacctacttttctgattcccccacccctcaaccaggact

SEQ ID NO: 176 - DNA, 441 bp, Homo sapiens
catgattttgcttaaattaatacttttaagtaatggaacttttttcaaaggcaaatttaaactatttaagaaatagctcctaatacttgggatcttgtttagagaatccactttctggaagttctcagcataattagtgttgagagtggttcagttgtctttaatgtttgtcatgtggaaatggaagtagcctctttttgttctgaaattgagtttattcaaagtgtaaaagcacatactgcattttctgctgaaagatcattatgtttaacaggcacttaatctcagtaaagtcagttgccagttaagttccacccagtagtcagtcccctttgtagttagtgggattatttgataattggttagatcatacttgtaaattttaatgctttgtgtaattggtttgaaaaacagtgaaatgggtaaacgcaaaacttttgt

SEQ ID NO: 177 - DNA, 195 bp, Homo sapiens; identical to SEQ ID NO: 8

SEQ ID NO: 178 - DNA, 367 bp, Homo sapiens
acagaatatttaatgagtctgtcttgccccaaaagggaaaaacacaagtagctaagccatttgcagagaggaaaaatgtcatggaaaaatgaaaaatctctctaatgtctatagcacatgaaatatctaaataggtgggtgcagtggttcatgcctgtattgggagaccaaggcaggcagatcacttgacgtcaggagttcaagaccagcctggccaaatggcgaaaccccgtctctattaaaaatacaaaaattagctgggcatggtggtgggtgcctgtaaacccagctacttaggaagctgaggcaggagaatcatgtgaacccaggaggcggaggttgcagtgagctgggatcacaccactgt

SEQ ID NO: 179 - DNA, 390 bp, Homo sapiens
acagttaaattaagaatattaaatcttccacacatgggctcaaataggaagtattttgtttagtaaaatgaaaattacttttaaaaaatatctgcagtgtttttgaaatgcaaggcaccaatagagagcagacattccagctgagtgattgtctggaaaaaaaaaatggaaccggtcagtcctctgtccttgttaattagaatacttccttcttcgtgtctatgcaacatcttccagataatccgcaacatcactgagctgggatacagtcagatcttgtgtgaggtcatcaagcttatcactggtattgatgtcatctatttccacagaaaggtcttcttctatctcttcaccaatacttatctcacttttctctgagcgatggctggt

SEQ ID NO: 180 - DNA, 195 bp, Homo sapiens
accattggtggccaatagatttgatggtaagggagggatcattgacctcgtctgttatgtaaaggatgcgtagggatgggagggcgatgaggactaggatgatggcgggcaggatagttcagacggtttctatttcctgagcgtctgagatgttagtattagttagttttgttgtgagtgttaggaaaagggcgt

SEQ ID NO: 181 - DNA, 554 bp, Homo sapiens
acctggacaacagagaccaagaaggcttctactgtgtgaggcctcaacacatgccctgtgctgcactcactcacatgtattctaagaacaagaaagtttcttatcttagcaaacaagaaaagagcctctttgaaaggtcaaatgtgggtgtagagattatggaaaaattcaatacaattagtgtctccaaatgcaacaaagaaacagttgcaatgaaagagaaatgcaagtttggaatgacatccacaatccccagtgggcatgtctggagaaacacatggaatcctgtctcctgtagtttggctacagtcaaaatgaaggaatgcctgagaggaaaactcatatacctaatgggagattccacgatccgccagtggatggaatacttcaaagccagtatcaacacactgaagtcagtggatctgcatgaatctggaaaattgcaacaccagcttgctgtggatttggataggaacatcaacatccagtggcaaaaacattgttatcccttgataggatcaatgacctattcagtcaaagagatggagtacctg

SEQ ID NO: 182 - DNA, 195 bp, Homo sapiens; identical to SEQ ID NO: 8

SEQ ID NO: 183 - DNA, 498 bp, Homo sapiens
accttacaccaataacccctaacagcctggggtctcagtggaactaacttaagtgaaagaaaattaagacaggcatagaattaggcctttgttttgaggctttaggggagcagagctccattgtggcatctggagtttcatctgaggcctacaggggtttcaaatggttgcatttaaggtcagaatctttgtgttgggaaatgctagcgactgagccttgacagctgagcacgggttgcctcatccctctcatgctgtctatttcttaatctaacaactgggcaatgcgttaaactggcttttttgacttcccagaacaatatctaattagcaaataacacaattcagtgacattcagcaggatgcaaattccagacactgcaatcatgaacactgtgaagacagtcctctccgtgggccgggacacaaagcagtccacagtgttgggacaaggccaggcgttgcacttcaccagccgctgcatggagaagccgtcgt

SEQ ID NO: 184 - DNA, 110 bp, Homo sapiens
acgggtatttgaaagtaacaaattatactacttacatacagagaaaaagacataactaaactacttcaaacccaatgcagaggaaactttcaaggcaaatgatgacttag

SEQ ID NO: 185 - DNA, 557 bp, Homo sapiens
  misc_feature 521: n = A,T,C or G
acaaagattggtagcttttatatttttttaaaaatgctatactaagagaaaaaacaaaagaccacaacaatattccaaattataggttgagagaatgtgactatgaagaaagtattctaaccaactaaaaaaaatattgaaaccacttttgattgaagcaaaatgaataatgctagatttaaaaacagtgtgaaatcacactttggtctgtaaacatatttagctttgcttttcattcagatgtatacataaacttatttaaaatgtcatttaagtgaaccattccaaggcataataaaaaaaagaggtagcaaatgaaaattaaagcatttattttggtagttcttcaataatgatgcgagaaactgaattccatccagtagaagcatctccttttgggtaatctgaacaagtgccaacccagatagcaacatccactaatccagcaccaattccttcacaaagtccttccacagaagaagtgcgatgaatattaattgttgaattcatttcagggcttncttggtccaaataaaattatagcttcaatgggaaga

SEQ ID NO: 186 - DNA, 493 bp, Homo sapiens
  misc_feature 409: n = A,T,C or G
actcctctctacccctaaggttgggctctgcctcagaggagtgagttttttttttttttctataaagtttacattgtcttactatttattgagtgaatttctggtcattgcccatgcaaatataagaaatctggctttaaatattagtcagtttcatggctatgactagattgttttcttgtataactaaatacccgtataaaatgaactaatgttttctctcccctccctaccccttccttatgaacaatgctttaggtatattgaaatctttaagagcagtagagctgaagttagaactcattatgatccaccacgaaagcttatggccatgcagcggccaggtccttatgacagacctggggctggtagagggtataacagcattggcagaggagctggctttganaggatgaggcgtggtgcttatggtggaggctatggaggctatgatgattacaatggctataatgatggctatggatttgggtca

SEQ ID NO: 187 - DNA, 488 bp, Homo sapiens
  misc_feature 374, 375, 422, 430, 431: n = A,T,C or G
accttgaatttaaattttttttaaacttcagtcttcaatattgaaactgctaagttaccccatttttccatgaaaaaaaatagaaaaataaacttggggaaaaaattaaaaataaaaaataaacttgggaaaacattactaaataggtttaagaaaaaagcctatataggccaggtgcggtggctcacacctgtaatcccagcactttgggaggccgagccagacggaccacctgcccgggcggccgcccgggcaggtactttggtagctatttaaataagaggggggtgggaatgaatgtcgagatacgagcacctgcatcttttagtcaattgtcagtggagtcagtggggtgctaagtgttctgaactganntaggtgcactaaggttccaagctccctgcaaaggatctggacgggangaaaagcnnaggcccctgaagggaaaaaagcctgcttcccaatacttattttttattactgtacct

SEQ ID NO: 188 - DNA, 498 bp, Homo sapiens
actccttatgctagcagattcaaagatatgcctaactttattgcccttgagaagtcatcagttctccgccactgctgtgaccttttgataggcattgcggctggatcaagtgataagatttgcaccagcagtctccaagttcagagacgattcaaggcaatgatggcatctattggaagactttcacatggtgagagtgctgatctgctaatcagctgcaatgcagaatcagccataggttggatcagctcaagaccatgggttggagaattaatgttcacacttctatttggagactttgaatcccctctacacaagctacgcaagtcaagttagttgccaagaaagcacagatgacaacctattaatgctgtgagaatgtttctagatcagtgcatggatggctccattgctctacgggccattgtgtctgagatcccagtctttgaggagaaaaaaaacaatggttaaaaaggcattggggaaatattttgagtt

SEQ ID NO: 189 - DNA, 501 bp, Homo sapiens
  misc_feature 82, 177, 261, 288, 296, 346, 382, 419, 481, 488: n = A,T,C or G
acagcaaccttggttcctctgggggttgagaataagaatagtggggagggaaaaactcctccttgaagatttcctgtctcanagtcccagagaggtagaaaggaggaatttctgctggactttatctgggcagaggaaggatggaatgaaggtagaaaaggcagaattacagctgancggggacaacaaagagttcttctctgggaaaagttttgtcttagagcaaggatggaaaatggggacaacaaaggaaaagcaaantgtgacccttgggtttggacagcccanaggcccanctccccagtataagccatacaggccagggacccacaggagagtggattanagcacaagtctggcctcactgagtggacaagagctnatgggcctcatcagggtgacattcaccccagggcagnctgaccactcttggcccctcaggcattatcccatttgggaatgtgaatgtggttggcaaagngggcagnggaccccacctgg

SEQ ID NO: 190 - DNA, 513 bp, Homo sapiens
acataagaaaatatttacaactaataaaaagcagattgtagaatatacatgttctatgtaggaaaataagtaaaatgttttatagtgcagaccaaacttttctaggccaagttttatccatgcaactcttttacaataccatctcattaacattcctggaacacatacatgcatggaagaaatctaacaattatcttgatttaaagctcatactgcctttttagggcctgtatatcttctaaagtaaaatggttgtttggtgtgtccgaaaggtcctcaaacagctgttcaattagctccttttggcccttgctaattagtgtcaacatcatcttaaacctttctgctttactcaggtataaaagatgctgatacaccaatgagggatctttttcaataagattatttttcagagactgaatgaggagaaggaatgtatccccttcaagtttgttacttaaaaacatcggcaaatcttttggtgcagtgatggctaaaagatgtgcacaggct

SEQ ID NO: 191 - DNA, 312 bp, Homo sapiens
actagaaacggaagtggaaacacatgcacagtttatcttttcactcttgtgaggtcagcagacatctgtaacgcactttccctacagcagctaacaaaggcaggatgatggtatctgttctgaacgtttgaaacaacatcaccacttatctttacagatttcctcaggttctcaatggagggcctgaaaaacatcactgtcaaggatgatgctgctacattttatgagctggagacgaacgagccctctcctgatgcctctccagtcacaggaataatggttttgaaaacgtcaatgctccatctgccttgt

SEQ ID NO: 192 - DNA, 386 bp, Homo sapiens
acttaatcaataaagtgaatgctttgtgcagttttaacaaagctgctgctaaaaagacagttgtgagtggtcaggtatatctgcaatagtaagcaagttcttacctttccagttctgtatgcttctgaaaacaccagctaaggtattaaatacccattttcaagtgaccttgtttttactatttcatatttatgacatctagtgctgagattctgggggctttaatagataaccttattaacccagataattttttttggagcccataaaataaaattgagaatggcatttcgggaaggtctacatatatgtatttagtaagttaattcgtaagttcactttacatagtaaattaatatttaccagtttttaattgctttcagtgt

SEQ ID NO: 193 - DNA, 454 bp, Homo sapiens
gcagatgcaggtggaggcagagcggcggaaacgggccacagttctagagtctgaggggacccgagagtcggccatcaatgtggcagaagggaagaaacaggcccagatcctggcctccgaagcagaaaaggctgaacagataaatcaggcagcaggagaggccagtgcagttctggcgaaggccaaggctaaagctgaagctattcgaatcctggctgcagctctgacacaacataatggagatgcagcagcttcactgactgtggccgagcagtatgtcagcgcgttctccaaactggccaaggactccaacactatcctactgccctccaaccctggcgatgtcaccagcatggtggctcaggccatgggtgtatatggagccctcaccaaagccccagtgccagggactccagactcactctccagtgggagcagcagagatgtccagggt

SEQ ID NO: 194 - DNA, 195 bp, Homo sapiens; identical to SEQ ID NO: 8

SEQ ID NO: 195 - DNA, 290 bp, Homo sapiens
  misc_feature 182, 183, 244, 245, 255, 256, 267: n = A,T,C or G
ccaggccagctggtctttaattatgtggttccgaagcaaattccttgtatgggcatcaattggaggggttccatctttgaatacagaattcaggggagccaggagggtcaaccgctcacttccagagagatgattgccgaggccggcttgtctgaaaaggtcaatggctgtggacacatcannctctgcagccaattcaaatagtgtcttggctgagtctgggatgagtagctcatcaatgtannggatcacccnnttggtggctangatgtctttattggagatgatcg

SEQ ID NO: 196 - DNA, 492 bp, Homo sapiens
tcgaaacttacctgcgggactgccctgacccttgtataggttggtgagcacacgtctggcctacagaatgcggcctctgagacatgaagacaccatctccatgtgaccgaacactgcagctgtctgaccttccaaagactaagactcgcggcaggttctctttgagtcaatagcttgtcttcgtccatctgttgacaaatgacagatctttttttttccccctatcagttgatttttcttatttacagataacttctttaggggaagtaaaacagtcatctagaattcactgagttttgtttcactttgacatttggggatctggtgggcagtcgaaccatggtgaactccacctccgtggaataaatggagattcagcgtgggtgttgaatccagcacgtctgtgtgagtaacgggacagtaaacactccacattcttcagtttttcacttctacctacatatttgtatgtttttctgtataacagccttt

SEQ ID NO: 197 - DNA, 470 bp, Homo sapiens
acctgtgggtttattacctatgggtttatatcctcaaatacgacattctagtcaaagtcttggtaatataaccaatgttttcaaatgtattctgttatacaaagagcagatttttattgaacttgtgcaataactatattaccatacaatataaatattcatgaatagtttcccaagtctggagcgaccacatagggagaaaatgtaaatgtctcaatttttgttcacaaaagtatattttatcaaattgctgtaagctgtggatagcttaaaagaaaaaaagtttcctgaaatctgggaaacaagacatttaaagaatcagcaaaatttcaaataaaaaattatgaaaatattatcctcattagttcatttagtcccatgaaattaattattttctctgcttgatcttggtggacagtttcatgaagctgtcagttagttcattaaagtttttggaaattctcagacag

SEQ ID NO: 198 - DNA, 448 bp, Homo sapiens
  misc_feature 393: n = A,T,C or G
attaggggaattttttaaaatctgtaatgtttggacaaacagatgatattactttgctataaaattataaatgtaacttttaataaagatagccagaatattctaaattagaaattacgtttttgtttccctcaagacataaaacaaatataaacattctaaactgctggatgaatctgaaaagacattaagttcaaattttaatttattctcatattaaatataactccattaaaagtttaaaatttcatgggagaaaatataataaggtaaagaggtagaatcactttcagacttaagaataatgttgatttcccaagtgctttaccttatctgttaaagcgtaagatgaattggtatttgcttcataggcagtttgactgcatgtattanagaatgaaaagaagatatttgtagtaatgcctggaaacttggtgctttaaattaa

SEQ ID NO: 199 - DNA, 270 bp, Homo sapiens
acctttggagataatgataaaattcaacaggttgaaccgtctaacaacagactttaatgtaattgtggaagcattgagcaaatccaaggcagaactcatggaaatcagtgaagataaaactaaaatcagaaggtctccaagcaaacccctacctgaagtgactgatgagtataaaaatgatgtaaaaaacagatctgtttatattaaaggcttcccaactgatgcaactcttgatgacataaaagaatggttagaagataaaggtcaggt

SEQ ID NO: 200 - DNA, 473 bp, Homo sapiens
acagacaaggtctatagaatgtggtaaaaacttgactgcaacacaaggcttataaaatagtaagatagtaaaatagcttatgaagaaactacagagatttaaaattgtgcatgactcatttcagcagcaaaataagaactcctaactgaacagaaatttttctacctagcaatgttattcttgtaaaatagttacctattaaaactgtgaagagtaaagaaaactaaagccaatttattatagtcacacaagtgattatactaaaaattattataaaggttataattttataatgtatttacctgtcctgatatatagctataacccaatatatgaaaatctcaaaaattaagacatcatcatacagaaggcaggattccttaaactgagatccctgatccatctttaatatttcaatttgcacacataaaacaattatataaacaactttgtaggactatgcccttttgtgt

SEQ ID NO: 201 - DNA, 463 bp, Homo sapiens
gttttaccactctgcagagaaagctaaggttgctaaccaaacaaaataactttacactgacaatgccaatttttacatttctttcagaacaagggacactcaaactaccagagaaacggaccaatggactgcgaagaactcctaaacaggtggatccaggtttaccaaagatgcaggtcattaggaactattctggaacaccacccccagctctgcatgaaggaccccctttacagctccaggccggggataccgttgaacttctgaaaggagatgcacacagtctgttttggcagggcagaaatttagcatctggagaggttggattttttccaagtgatgcagtcaagccttgcccatgtgtgcccaaaccagtagattattcttgccaaccctggtatgctggagcaatggaaagattgcaagcagagaccgaacttattaatagggtaaatagtacctg

SEQ ID NO: 202 - DNA, 460 bp, Homo sapiens
  misc_feature 16: n = A,T,C or G
actacggaatatctcnaaaaactgcactagagacaaagacgtgatgttaatatcttttccccacaattattacggataaacagtagcaccaataaataaatgataacaaatattaaaattaaaaaaggagagagatttagtatgtagaattctctattttttcttgttttgtttttacatataaaaaacagaatagcaatgtctattttatcagaatcacatatatacataaacatatatatatatatatacacacaaatacaagttgccaaatatatatatagtatgtagatgtatattgaaaccttatttcaaaggaatgtgtgctggggagccaggggatcggggagggcagagctgagtgttagcaaaattaaatatctgttcaagataagctagtgactgtcaccgatcagggagagagagattggaaacatgaattttatatacaaaaaccggt

SEQ ID NO: 203 - DNA, 374 bp, Homo sapiens
actgtccagtatagtagcccttagccatatgtgactactgagcacttaaaatgtggccagtcagaattgagatgtgctgtgagtgcaaaatacactcaaatctaagacttagtatggaagaaaaagaagataaggtgtttcattaataatcttttatattgattacatgttgaaatgatatttttaatatactgggttacataaactgttattaaaattaattttgcttgtttcttttttaatatggctactagaaaattaaaaattatgttgtggttcacattatatttctgttgaacaatgtggacatagataatctacagtcattacattagccttagaatttagcatcatacttttaagcactctggggt

SEQ ID NO: 204 - DNA, 293 bp, Homo sapiens
aaaatgtctgaaggaatataaatgaagttgtcattagtagttatcttaggggtccgggattatagaggaacttttatcttctacatggcctttttctatagtgtttgaattttaattacaagaccagtgatttataaattcatacactccacagccccatccattacaatagcacataatataataacattagccatggacttacctaaattgcttttgtcatgtgtctgctggtgatgcccaacccagtgctctgcacccaggtcacactgtggctttgtcctctgcttatg

SEQ ID NO: 205 - DNA, 546 bp, Homo sapiens
  misc_feature 8, 9: n = A,T,C or G
actattgnnaaaatgaccaacaaaaactttaagaacagcctgaaatctgctggaaacttccctcatcccattattaggatgaccagggatcacttcaatagattttcaggtgagaaagctggaggataatttctaggattacaatatttttgttttacctaaggttggtcattaaaagaaagtaagatttaatttatttaacaagaagaaaataattcatttgactagtcatttaaacctattctatttaacagaagagggaacaattttgttcagtagtgacctcattagaagagcccattttgaagagttctaatgtatattctcaatatataattagcattcccccaaacccctaatgtaagttgtaaattaaacattatgttgtttactggcatttctattttctacttcagttctctttatttgaaacatgacaaaatttcatttacataagatttctatattataaagattaaaaatttaaaggaaaaatattggttttggtggtttaaaactaaaaaaaatggaagcatgatcattggt

SEQ ID NO: 206 - DNA, 195 bp, Homo sapiens; identical to SEQ ID NO: 8

SEQ ID NO: 207 - DNA, 282 bp, Homo sapiens
accacgttccttcaaagagtgaatctattgaaccctggggaatatagttgaccaaatgatgggtgtcctctctgagcttcatgttttcagcgaagacatctggtgccacaccagttcttgaatcaagccttgatttaagatcacataaacttgctgttattttatcaagagcagaccccggtgtagcatcttgtgtgactttaagagagtatagagtggcagccaaaccagaaccataagaaaacaccccaattctcttccctgctaattgctgaggtgagt

SEQ ID NO: 208 - DNA, 560 bp, Homo sapiens
actctggtttcaagtagcacactggaaaagaaaattgaagatcttgaaaaggaagtagtaagagaaagacaagaaaacctaagacttgtgagactgatgcaagataaagaggaaatgattggaaaactcaaagaagaaattgatttattaaatagagacctagatgacatagaagatgaaaatgaacagctaaagcaggaaaataaaactcttttgaaagttgtgggtcagctgaccaggtagaggattcaagactcaatgtggaaaaaatattttaaactactgattgaatgttaatggtcaatgctagcacaatattcctatgctgcaatacattaaaataactaagcaagtatatttatttctagcaaacagatgtttgttttcaaaatacttctttttcattattggttttaaaaaagcattatccttttatctcacaaataagtaatatctttcagttattaaatgatagataatgcctttttggttttgtgtggtattcaactaatacatggtttaaagtcacagccgtttgaatatattttatcttggtagta

SEQ ID NO: 209 - DNA, 503 bp, Homo sapiens
acctgtgggtttattacctatgggtttatatcctcaaatacgacattctagtcaaagtcttggtaatataaccaatgttttcaaatgtattctgtcatacaaagagcagatttttattgaacttgtgcaataactatattaccatacaatataaatattcatgaatagtttcccaagtctggagcgaccacatagggagaaaatgtaaatgtctcaatttttgttcacaaaagtatattttatcaaattgctgtaagctgtggatagcttaaaagaaaaaaagtttcctgaaatctgggaaacaagacatttaaagaatcagcaaaatttcaaataaaaaattatgaaaatattatcctcattagttcatttagtcccatgaaattaattatttttctctgcttgatcttggtggacagtttcatgaagctgtcagtttagttcattaaagttttggaaattctcagacagtgcagtggtatcagaaacttgtattcaagagt

SEQ ID NO: 210 - DNA, 343 bp, Homo sapiens
acatacacacatacacacacacaaccccaacatgaacagtgtatacttgatatctgagggggatatgcagtaattttaacaatacatgtcgatggcctgaacaaaggtgaatgctgcctgtgttaagcattgcttaaaaaatctacttttaagcaaagcaagttgccttccttaggtcagccactgcctggtccgaccagtgcagcttggccagcctcactatgagtggtcttattcccttgtcctctccaggccgatatactaatatataggctcacaaggagctgtagggtttccctcctgccctcttaggtagagaagtataggcacttctctacccagt

SEQ ID NO: 211 - DNA, 296 bp, Homo sapiens
acacagttgtgcctgccagcattgcaactccagtgccctcagtgaaacccgagtatcttaccctgctggtaagtggcaccaccgcatacatcagcctgaaagagctcggaggactgtcggaagggaaaaaagttttggtgacagcagcagctgggggaacgggccagtttgccatgcagctttcaaagaaggcaaagtgccatgtaattggaacctgctcttctgatgaaaagtctgcttttctgaaatctcttggctgtgatcgtcctatcaactataaaactgaacccgtaggt

SEQ ID NO: 212 - DNA, 253 bp, Homo sapiens
acagccagaaaaattagaacttattatggatgaaatgaaacagattctaactccaatggcccaaaagtaagaaagttgtttttgttttgttcttaagaaatgacattcaaaggaggaaggttttccataactgttgcccagaagaggtagctatttcctgcttacaagtattaatctattctaaataagagtgcaaaagtgttggtttgaaaccattcttggtgcaaaaggagatttctttttctgatattgt

SEQ ID NO: 213 - DNA, 183 bp, Homo sapiens
  misc_feature 10, 11, 15, 22: n = A,T,C or G
accattggtnncccnttgattngatggtaagggagggatcgttgacctcgtctgttatgtaaaggatgcgtagggatgggagggcgatgaggactaggatgatggcgggcaggatagttcagacggtttctatttcctgagcgtctgagatgttagtattagttagttttgttgtgagtgtta

SEQ ID NO: 214 - DNA, 276 bp, Homo sapiens
acctctcaacattaccaaaatcatttctttagagggaaggaataatcattcaaatgaactttaaaaaagcaaatttcatgcactgattaaaataggattattttaaatacaaaaggcattttatatgaattataaactgaagagcttaaagatagttacaaaatacaaaagttcaacctcttacaataagctaaacgcaatgtcatttttaaaaagaaggacttagggtatcgttttcacatatgacaatgttgcatttatgatgcagtttcaagt

SEQ ID NO: 215 - DNA, 202 bp, Homo sapiens
  misc_feature 8, 10, 11, 184: n = A,T,C or G
accattgntnnccaattgatttgatggtaagggagggatcgttgacctcgtctgttatgtaaaggatgcgtagggatgggagggcgatgaggactaggatgatggtgggcaggatagttcagacggtttctatttcctgagcgtctgagatgttagtattagttagttttgttgtgagtgttangaaaagggcgtacctgcc

SEQ ID NO: 216 - DNA, 488 bp, Homo sapiens
acttttagatcacaaatttgcctttaagtaacacataatacacttaaggcagatttgccttacaggtggcctcagcttctaaacaccactacactgctttatataaaaaacaaaaatcacatagaagagaatctagtgacatctttcttggtattttaaacttaaaaactgcataataaattgagttcccataaaatttcgcccttgagataggaaacaaacactactactattttatagttgcctttatctgacttgattgatgcagttataatagtattaataacataatctttaaatttgtgagggaaaaccaatactttatattcactcctcataaaaggttcaacagcaagcataatgaggagccattataaaatcatattgctaagtattactttaactcataattctgcttatataagtgtatgcatatcacagttaacaaatactatttaattatcaagacatatgcaaaagtatttttt

SEQ ID NO: 217 - DNA, 195 bp, Homo sapiens
  misc_feature 5, 66, 155, 189: n = A,T,C or G
gcttntccgagggtaaaatagagacccagtaaaattgtaataagcagtgcttgaattatttggttncggttgttttctattagactatggtgagctcaggtgattgatactcctgatgcgagtaatacggatgtgtttaggagtgggacttctangggatttagcggggtgatgcctgttgggggccantgccct

SEQ ID NO: 218 - DNA, 349 bp, Homo sapiens
acacatgtgttatctacctcaaggtaacaagagtatgtggcaaaacatataccacccatagtgcttcacaaaatgcacttctatttagccagcgtttattgtagtaaactattcttaataaaactcactcactgtttataaatgttctggtatgcattctttatagtgaagtgttaatacatcacatcttatttattttagcaaatcagtatattttctgtatttaattataaaaaattaacttagtttttaaaatttatttgcaaatatactttttccatttggcactatggtttgttgcctacctagctgcatctataatgtcagcttatcctaaggctgtccacgt

SEQ ID NO: 219 - DNA, 292 bp, Homo sapiens
ttctttataactgacttagtcatttgccgcttagcagtttatatactgaaatgaaaacatcttgtggggaaaagtgactttagattatgaactcaattcaaatgaactctatttaaaatggggtcctattttggacaaaggaaattaagaatgtaaaagtcagaacagtcttgaggtaaaaagtgtgctttggcttaaaagggatacagtatattaattacatcttttattattattgtttatttcttagaatcatttctggctttctcaaaacaaaataatattaatgagt

SEQ ID NO: 220 - DNA, 451 bp, Homo sapiens
acaagtcattactcccccttctcccatatgaacaagaattttttaacggtcagaatatattgggcatcaaattaaaaacttttttttcaaaagtctacagaatggatattggagcaaaaattacaaagtgggtcagatacaggtttttaaaaactgcattactgaatttaacaaaagtcagacactagaatcatatatttgctgcataaaagttgatttgatacctggtggtgattgaatttagtctcaaagactcataaataaaaatctgacttaagacgtagtcataccagtataccaattctcccatcactttgactttcggcagagagattagagcaaaaaatattcaggagaacagtggagttacattgtattatgtatgtttaatataatatcaattttaaggttaaggttaaggaaatcttaattttaaggttaaaccttgagt

SEQ ID NO: 221 - DNA, 484 bp, Homo sapiens
actcgcggccgggcatggtggctcacgcctgtaatattgattttaaacaacctcagaaggaacgcaagcccagggtgcaaataacagcagactactgccctcctcaacctatttcccttaggctgtttcaggcccttctccctggtccctcattttccttgctcccaacacagcttactttttgcactgctaaatgtataatggaattcctaggattctgataaagccttgcttagaagactaaaagtcaatctacgacaaagatacttaacgagtcttagtgtcacctaagaatctcctaggcaaagcaatcttaaagggcagggaagatattatatttaaaatccaagctgcttttctaaaaagaagagatgatcacaaattacaagatcttcattatcataaaaaacaaataactattttgtcagacacctaaaacttgtcaagtaatttttaacatctcaatatgtaaaaagaacatact

SEQ ID NO: 222 - DNA, 273 bp, Homo sapiens
acagggaggaatttgaagtagatagaaaccgacctggattactccggtctgaactcagatcacgtaggactttaatcgttgaacaaacgaacctttaatagcggctgcaccatcgggatgtcctgatccaacatcgaggtcgtaaaccctattgttgatatggactctagaataggattgcgctgtcatccctagggtaacttgttccgttggtcaagttattggatcaattgagtatagtagttcgctttgactggtgaagtcttagcatgt

SEQ ID NO: 223 - DNA, 617 bp, Homo sapiens
  misc_feature 584: n = A,T,C or G
acagatgtgcaggaatgctaggtgtggttggttgatgccgattgtaactactatgagtcctagttgacttgaagtggagaaggctacgatttttttgatgtcattttgtgtaagggcgcagactgctgcgaacagagtggtgatagcgcctaagcatagtgttagagtttggattagtgggctattttctgctagggggtggaagcggatgagtaagaagactcctgctacaactatagtgctcgagtggagtagggctgagactggggtggggccttctatggctgaggggagtcaggggtggagacctaattgggctgatttgcctgctgctgctaggaggaggcctagtagtggggtgaggcttggattagcgtttagaagggctatttgttgtgggtctcatgagttggagtgtaggataaatcatgctaaggcgaggatgaaaccgatatcgccgatacggttgtataggattgcttgaatggctgctgtgttggcatctgctcgggcgtatcatcaactgatgagcaagaaggatataattcctacgccctctcagccgatgaacagttggaataggntgttagcggtaactaagattagcatggtaatta

SEQ ID NO: 224 - DNA, 465 bp, Homo sapiens
acctgtgggtttattacctatgggtttatatcctcaaatacgacattctagtcaaagtcttggtaatataaccaatgttttcaaatgtattctgtcatacaaagagcagatttttattgaacttgtgcaataactatattaccatacaatataaatattcatgaatagtttcccaagtctggagcgaccacatagggagaaaatgtaaatgtctcaatttttgttcacaaaagtatattttatcaaattgctgtaagctgtggatagcttaaaagaaaaaaaagtttcctgaaatctgggaaacaagacatttaaagaatcagcaaaatttcaaataaaaaattatgaaaatattatcctcattagttcatttagtcccatgaaattaattattttctctgcttgatcttggtggacagtttcatgaagctgtcagttagttcattaaagttttggaaattctca

SEQ ID NO: 225 - DNA, 344 bp, Homo sapiens
acagcaaagcgacccttggtgtcatagatcagacggaaattctctcccgtcttgtcaatgctgatgacatccatgaatccagcagggtaggttatatcagttcggaccttgccatcgattttaatgaaccgctgcatgcaaatcttctttacttcatctcctgtcagggcatacttaagtctgttcctcaggaaaatgatgagggggagacactctctcaacttgtggggaccggtggatggacgaggagcaaacacaccggtcaatttatccagcatccaatgctttggagctgccacccgcttcagatgcttcttgggaccacgagccatggctgcgacctg

SEQ ID NO: 226 - DNA, 501 bp, Homo sapiens
  misc_feature 432: n = A,T,C or G
actgccaggtaacgctgttgtttccgttgagcctgaactgatgggtgacgttgtaggttctccaacaagaactgaggttgcagagcgggtagggaagagtgctgttccagttgcacctgggctgctgtggactgttgttgattcctcactacggcccaaggttgtggaactggcagaaaagtgtgttgttggagttgagcttgggcggctgtggtaggttgtggatacttcaacaggggctgctgtggtgccgggaggtgaaggtgttgtgtcacttgagcttggccagctctggaaagtggtagattcttcctgaaggccagcgcttgtggagctggcaggggtcagtgttgtgtgtagcgagccagtgctgctgtgggtgggtgtagatgcctccacgaggcctgaggttatggtgtcgtcaggtaagantgtggtttcagtgtcgcctgggctgctgtggaaggttgtagattgttgaccaagggatgaggctgtggt

SEQ ID NO: 227 - DNA, 455 bp, Homo sapiens
accccacagaattcacatgggataatgatgctctcctccacagggtgtgaattgctcaggcccatcaaagagtctaactggttacttgcagcctgttgcaagaagttctggaagatgacatcaggttcctccacccctctgggggaagagctgccagtattgagtgaaggtaaggcacgtgaagggttacagcttgtctgatggtcaatcagcagttcctctgggtagagctcctcacaaaattcacaaggcaacatgatctcgtcagctgcaccctttatgtcactgagagacctgggaccgccatgagactggtcggcctcacatacggccctccagaagtcctgctctgccacactggaggcttggccttcattttgcagacttagggccaacatgaagtccaagtttgcactctcttcaccaccctctttggggggctgttggcctctatt

SEQ ID NO: 228 - DNA, 253 bp, Homo sapiens
actgttacctgtttgtctcggaaagagtgagggaatcagcagggagtctgagatgtcatttctgttgtaataaatggagcttggatgaaatggcactatattatgactacagcagatggcccattttgaaacttgcattgaggaggctgcagaagtgttgagtgctgaggtatacccctatgttttcatccgattgctttctgctattataggaatgggacgcgagagataaagattctatccgacgagtagt

SEQ ID NO: 229 - DNA, 167 bp, Homo sapiens
acctcatggattaccaagatttgctgaaccctattggtgttactggatcaaatccaaataaagaaactccatgcttagagttggagtttgactggttcagcagtgtggtaaagttcccagatatgtcagtgattgaagagcatgccaattggtctgtatcccgagaa

SEQ ID NO: 230 - DNA, 286 bp, Homo sapiens
acaggaatatgttatgcaataaagtgaggaagagaaaaagggaataagaagggaggaatgtaactagagcagctcccaacagtttgcctatgtatttgccagcaccaaaatttgtagagtaagccacttacatttccactgctagtattaaggaaagacagcagtggtgatttttataaagtgagtatacatttatttttattctgatatgtgaatttttctttcacgagttaattaactggtaatttgtaaacagtgggaagaagattagaacaattatggaggt

SEQ ID NO: 231 - DNA, 304 bp, Homo sapiens
tctgcttctaacgccttcatggtatgtggggttctgtatgccacccgtaccatactacaaatatttaaatgcaaaattaccaacctatatagcagttttatttgccctataggttgcatactaacttaagcattcatgtcaccataaaatgcctttagcatttctcaatgactggatgggaaattttcctttattgcctagctgcttgtgtttgagtggttgtcctatgagcaatgcatttggagttcttcagctttcactacttctctgttgcttgctaatcatgtaactactaaaatactgt

SEQ ID NO: 232 - DNA, 237 bp, Homo sapiens
  misc_feature 12, 25, 82, 174, 175, 176, 189: n = A,T,C or G
acaggcacaganctctccacaccgntggccactgactgtttcttaaactgccccttggccttgaccatgatctccacgcggntgtgggagaacttctcaatgacagactcaatccagatcagtggcttgacctgggtgctgaggcggtatgacatgagctcaaagtcaccatcnnncgggatgaagganatggtgcggtcgttgtcaaagcgagagagccgcacgcactggtggaat

SEQ ID NO: 233 - DNA, 518 bp, Homo sapiens
actcagctctgagcaggagtttcagatgttccccaagtctcggctcagctccgtcagcgtcacctactgctctgtcagtcaggacttcccaggcagcaacttgaatttgctcaccaacaattctgggacgcccaaagaccacgactcccctgagaacggtgcggacagcttcgagagctcagactccctcctccagtcctggaacagccagttgtccttgctggatgtgcaacgggttccttccttcgagagcttcgaagatgactgcagccagtctctctgcctcaataagccaaccatgtctttcaaggattacatccaagagaggagtgacccggtggagcaaggcaaaccagttatacctgcagctgtgctggccggcttcacaggaagtggacctattcagctgtggcagtttctcctggagctgctatcagacaaatcctgccagtcattcatcagctggactggagacggatgggagtttaagctcgccgaccccgatgaggtggcccgcc

SEQ ID NO: 234 - DNA, 130 bp, Homo sapiens
  misc_feature 117, 118: n = A,T,C or G
ggttttttttttttaagaggaaaacccggtaatgatgtcggggttgagggataggaggagaatgggggataggtgtatgaacatgagggtgttttctcgtgtgaatgagggttttannttgttaatgtgg

SEQ ID NO: 235 - DNA, 255 bp, Homo sapiens
tgaaatgttaaggaagaagatagatccaattaaaaaaaattaaaaccaatttaaaaaaaaaaagaacacaggagattccagtctacttgagttagcataatacagaagtcccctctactttaacttttacaaaaaagtaacctgaactaatctgatgttaaccaatgtatttatttctgtggttctgtttccttgttccaatttgacaaaacccactgttcttgtattgtattgcccagggggagctatcactgt

SEQ ID NO: 236 - DNA, 474 bp, Homo sapiens
acttttttgtttacttgtgaaaatggccatctttaagcatatttattttctgccactttatttaaaggcaagcaatattttcttgatcataaatattttgtaatgaaatacttcctcttttccagggctttgtatgcacttgtataattacattgatggcaatgtagagtttgaatttcagtctgtaaatacttttttggaaaatagaaatttttattgctttaaagttttggatatgggtggttttcttttccgggtttggtggaaagtaatttgagaactttaaggttgtctttttaactgctggcaaaatgttgattttttaatattagataaaacgagtaaacgaaattccccagaaattagtagtaagtggggtctttgtgggttgggaagtagttttaatgtagaaagacatttacatataagtctgtttaatttcaaaggagtttgtgaaaaaaaatccatggtgaa

SEQ ID NO: 237 - DNA, 238 bp, Homo sapiens; identical to SEQ ID NO: 67

SEQ ID NO: 238 - DNA, 349 bp, Homo sapiens
  misc_feature 13, 22, 79: n = A,T,C or G
acaaagacaaacnaacaaactncattggcatttaagccaatcaaaaaaggaaagaagagaaatccctggtctgattcanaatcagataggagcagtgacgaaagtaattttgatgtccctccacgagaaacagagccatggagagcagcaacaaaaacaaaattcacaatggatttggattcagatgaagattttctcagattttgatgaaaaaactgatgatgaagattttgtcccatcagatgctagttccacctaagaccaaaacttccccaaaacttagtaacaaagaactgaaaccacagaaaagtgtcgtgtcagaccttgaagctgatgatgttaagggcag

SEQ ID NO: 239 - DNA, 434 bp, Homo sapiens
actgaatggctggagacaacactttatcagttttgacactgacaggagtggaacagtagacccacaagaattgcagaaggccctgacaacaatgggatttaggttgagtccccaggctgtgaattcaattgcaaaacgatacagcaccaatggaaagatcaccttcgacgactacatcgcctgctgcgtcaaactgagggctcttacagacagctttcgaagacgggatactgctcagcaaggtgttgtgaatttcccatatgatgatttcattcaatgtgtcatgagtgtttaaatcaagaggaagctgcatgaatgtaatcaacattccaactggagctctcctttgcttgtcctctttgccttcggtaatatgtataaacttacatcacgactttctcttaacagctgttgtaaagtttattactttatgt

SEQ ID NO: 240 - DNA, 224 bp, Homo sapiens
  misc_feature 59: n = A,T,C or G
acccgagtgcagttggcagcccgtggctccaggtccttgggatccacaaggtggctcanaagactgctctccaggtggccccggggagcggtggaatcaaattgggcattgggcttatctaacagcaagggcagggccacggcaaatccagccatatccacagggaagggcctgctgggctcccatgctgtgcggaagcccactacccggccgtcctgtacctg

SEQ ID NO: 241 - DNA, 346 bp, Homo sapiens
  misc_feature 324, 325: n = A,T,C or G
acaaccaaaacaacgtccttagtatcttaaggtttaagatttccgaaaagaaaaaagccatgttctaacaaaagtgttcaccacagaaaaattaaacataggggaaggtaaacattaaagtttcaaaaaaacaggtaaatcatacagctgcttctgtgcttgatgttctaatctggcacaagtgtttcgtaactataatatacgttattatttttaaaaaatactgtcatgacaacagcttacattattaaatattgaggaacactttatatcaatttaactcatacttaaaaatgtaacatacgtaaattctatagctctatnnttttttttttttttggaatgt

SEQ ID NO: 242 - DNA, 411 bp, Homo sapiens
ttttgagagccagaacggaagtcttggttttatttatagttgataacttacatccggcctgctcctcaggaagcacagcagggaggagacagagcccaaaggagacggcgacaaaaatgcccaaacccctgagctaatgtggtgactgagagcaagcctaaagctcccttctgagctccccagcagccaaagcaaagagagaaacagggtcctgcagcatgatgtcacagaaaaccagggaccctggagcctgggttccaataagaaccttacattctgacgccttagatttctccctggaaaatggggagaaaaatactgaattggttgggagggccatgcaacacacccagcacagtgtctggatgcatttcagaggccccaccagtctagggtctacagaaagacagt

SEQ ID NO: 243 - DNA, 429 bp, Homo sapiens
actaaaatttttaaaggagagaaactttaacaaaaatcttgataattaaaaattcaaattgtgctagatagaatgtattccaaaatttctgctaaaaatttttgcttttagtttgtaagacataattcaggagaacctcaaagaaaaatttagcaattaagtttggaaaagctataaaagagacctttactttttgaacagacatttttccctttcccaaaatgtgtattattcaagaagcatatttataaatttcattaaagaaaatatcggccaggtgcggtggctcacacctaatcccagcactttgggaggctaaggtgggtggatcatgaggtcaggagttcaagaccagcctggctaacatggtgaaatcccccgtctttactaaaaatacaaaaattagctgggcgtggtggcaggtgcctg

SEQ ID NO: 244 - DNA, 464 bp, Homo sapiens
acatcaaagattacatgaaatcaatcaaagggaaacttgaagaacagagaccagaaagagtaaaaccttttatgacaggggctgcagaacaaatcaagcacatccttgctaatttcaaaaactaccagttctttattggtgaaaacatgaatccagatggcatggttgctctattggactaccgtgaggatggtgtgaccccatatatgattttctttaaggatggtttagaaatggaaaaatgttaacaaatgtggcaattattttggatctatcacctgtcatcataactggcttctgcttgtcatccacacaacaccaggacttaagacaaatgggactgatgtcatcttgagctcttcatttattttgactgtgatttatttggagtggaggcattgtttttaagaaaaacatgtcatgtaggttgtctaaaaataaaatgcatttaaactcgaaaaaaa

SEQ ID NO: 245 - DNA, 375 bp, Homo sapiens
actccacattgagaagcatctccgtgaggttgctgcgggccagcacatacatgagcacaggcaggaagtcatccgccccatagggcttccctgggttgccgagggccatggagtcgtagatgagtttgcaggtcttgagcaggatggagatcttcttctcaggtgagtaggccttgtgcatgctggtgaacttctgcaggatcttctccatcatgggcacctccggcacgctggtggtcacacctaggtcagtggtggtggtggccaggatcactaactggttctccttgagctgctgcagcgaaccatccttgctgtggatctgatgcaggcatgagttgatggcttccttcaggggcttcaggacacatttgt

SEQ ID NO: 246 - DNA, 99 bp, Homo sapiens
  misc_feature 51, 76, 77: n = A,T,C or G
cttagtaaatggaaatatgcagaactacgtgataccatcaatacttcttgngatattgagctcctggcagcttgcnnagaagaatttcataggagacta

SEQ ID NO: 247 - DNA, 334 bp, Homo sapiens
  misc_feature 9, 14, 244, 289, 314: n = A,T,C or G
actgatttncatcnttgcatttacaactgctacaaaaatgccagcactccatcgacatgaagaagagaaattcttcttaaatgccaaaggccagaaagaaactttacctagcatatgggactcacctaccaaacaactttctgtcgttgtgccttcatacaatgaagaaaaacggttgcctgtgatgatggatgaagctctgagctatctagagaagagacagaaacgagatcctgcgttcacnttatgaagtgatagtagttgatgatggcagtaaagatcagacctnaaaggtagcttttaaatattgccanaaatatggaagtgacaaagt

SEQ ID NO: 248 - DNA, 308 bp, Homo sapiens
  misc_feature 18, 19, 27, 28: n = A,T,C or G
ggacgggaggcgagcaanntggcgcanncgcagggcacccggaggaaagtctgttactactacgacggggatgttggaaattactattatggacaaggccacccaatgaagcctcaccgaatccgcatgactcataatttgctgctcaactatggtctctaccgaaaaatggaaatctatcgccctcacaaagccaatgctgaggagatgaccaagtacctaacaaacccacaggtcctaaactaccaaacctgcattaaaaatttcggttggggcgacctcggagcagaacccaacctccgagcagt

SEQ ID NO: 249 - DNA, 408 bp, Homo sapiens
actggaaaagatgggaaatacaaaagtgtatatgtaggagaagaaacaaatatcactttaaatgatctcaagccagccatggattaccatgcaaaagtccaggcagaatataattctataaagggaactccttcagaggctgaaatctttaccaccttgagctgtgaacctgatatacctaatccaccaaggatagccaatcggaccaaaaattcactcactttgcaatggaaggcacctagtgacaatggttctaaaatccaaaactttgtattagaatgggatgaaggaaaaggaaatggagaattttgtcagtgttacatgggctcacagaaacaatttaaaattactaaactttcaccagcagtgggctgtaaattcagactatcggccagaaatgactatggt

SEQ ID NO: 250 - DNA, 563 bp, Homo sapiens
  misc_feature 505, 526, 540, 542: n = A,T,C or G
acggtagaactgctattattcatcctatgtgggtaattgaggagtatgctaagattttgcgtagctgggtttggtttaatccacctcaactgcctgctatgatggataagattgagagagtgaggagaaggcttacgtttagtgagggagagatttggtatatgattgagatgggggctagtttttgtcatgtgagaagaagcaggccggatgtcagaggggtgccttgggtaacctctgggactcagaagtgaaagggggctattcctagttttattgctatagccattatgattattaatgatgagtattgattggtagtattggttatggttcattgtccggagagtatattgttgaagaggatagctattagaaggattatggatgcggttgcttgcgtgaggaaatacttgatggcagcttctgtggaacgagggtttttatttttttggttagaactggaataaaggctagcatgtttatttctaggcctactcaggtnaaaaaatcagtgcgagcttancgctgtgatgagtntncctgcaaagatggtagagtag

SEQ ID NO: 251 - DNA, 490 bp, Homo sapiens
acccgggaggcaccccgtcagcccgtgtgccgggggctcagcctggagctcttggaggaaaatgctacctaataggcagttccgtaattaggcagctaaaagtttttcctaggcatttatgcaagcctcccaggccattttcagcactcatcgaagactctattcctacatgtagtcccgaagttggaggccctgagaacccctacctgatagacccagagaaccaaaacgtgaccctgaatggtcctgggggctgtgggacaagggaggactgtgtgctcagcctgggcagaacaaggactgaagcccacacagccctgtcccgactcagggccagcatgtggattgaccgcagcaccagggctgtgtctgtgcacttcactctctataaccctccaacccaactcttcaccagcgtgtccctgagagtggagatcctccctacggggagtctcgtcccctcatccctggtggagtcattcagcatctt

SEQ ID NO: 252 - DNA, 202 bp, Homo sapiens
ttttttttgcagagtctgatcttatttatttgttactcaaaaaatcttatttctgactggattcagacttagaagtagaagctcgcagagaggaaagtctgcgtctcttcgcaatttgttcctggcgcttctccttagcctccttcattctcttggccaaaagtttagcatattctgcagcctcttctttatttttcttggt

SEQ ID NO: 253 - DNA, 426 bp, Homo sapiens
acttccagctgatattggtgccctttgattgaaaatgacccaaatcaacccttggttaacgtaggcattaaaagaatgtattgagagaaccttggacatctcagagacaccaaccaagaaccaaacaatccagctttgaaagggcaaggatcagagtggctctgagcttcagggagcaggaattgagaaagatgaggatgtcttcatgtcacgtggctcaagatgccaattctagggagaaaaggtgtatcgagcccagcctgagttttttaccaccctcaaaaaggtgtggacagagctccttaatcagcagatgatcccatcaagaacacagagaggagaggagatcaatacccaaagagtagcaaaggtcctattagcaaagaatgttaaaagagatgctaggcaggcaaaaataatagcagt

SEQ ID NO: 254 - DNA, 195 bp, Homo sapiens; identical to SEQ ID NO: 8

SEQ ID NO: 255 - DNA, 195 bp, Homo sapiens; identical to SEQ ID NO: 8

SEQ ID NO: 256 - DNA, 533 bp, Homo sapiens
actttgttatttttccatcactaaaggccaatcagaatttggaaccatgctgctacccaagaaatctaatggaatgaattagttctgtagatgacaatttcttcacccatttatgagacctaaatcttttccataacactcatgtattcagtataacaacatactaactgaaagagggacctgattgtttaaagtttgattgcagacactgtagaacataactcattatgtttcagataaggtaactcctagatatcaaactaatttgttggggtagagattttacaagtcatgccattagaagattttctctgatattatatgtgcagttcagttacaagataaaatcatgtttttttaacaaaagagataaaatacaattgaagcaaaaaataacagctagtatataatatatacagtctgtatttgcttttcacagtaggcctgatgactaaaagatatgctttattacacgctattttcacctcttgaaagtcaaaggtgatgattaatttcatttagcagggaagtgg

SEQ ID NO: 257 - DNA, 356 bp, Homo sapiens
gggcacgacactggaggtgggctgcagcggggacatgctcactatcaacgggaaggcgatcatctccaataaaggcatcctagccaccaacggggtgatccactacattgatgagctactcatcccagactcagccaagacactatttgaattggctgcagagtctgatgtgtccacagccattgaccttttcagacaagccggcctcggcaatcatctctctggaagtgagcggttgaccctcctggctcccctgaattctgtattcaaagatggaacccctccaattgatgcccatacaaggaatttgcttcggaaccacataattaaagaccagctggcctctaagtatctgt

SEQ ID NO: 258 - DNA, 387 bp, Homo sapiens
  misc_feature 90, 101, 279, 292: n = A,T,C or G
acggccagggctattggttgaatgagtaggctgatggtttcgataataactagtatggggataaggggtgtaggtgtgccttgtggtaanaagtgggctanggcatttttaatcttagagcgaaagcctataatcactgcgcccgctcataaggggatggccatggctaggtttatagatagttgggtggttggtgtaaatgagtgaggcaggagtccgaggaggttagttgtggcaataaaaatgattaaggatactagtataagagatcaggttcgncctttagtgttgngtatggctatcatttgttttgaggttagtttgattagtcattgttgggtggtaattagtcggttgttgatgagatatttggaggtggggatcaat

SEQ ID NO: 259 - DNA, 253 bp, Homo sapiens
acaagctccagaggagcaattgggtctttaaatatacacaagtatttccatcaaatgaattttcacccttacatccaaatagacctaagcggttaaaaacataagaaaaataagagctattagctatgtattaactgagaaaccacatacaaaccaaagaatatggaagagagaaagaagggctgaaaggccaaaggttgaaggggtagggagatgtaaaagagttgggaacaaagcccatcacacttgatgt

SEQ ID NO: 260 - DNA, 474 bp, Homo sapiens
acagagatcggatcacacaagcccggagacagcgcagcttctccattgactctggtcgcagacgcaaaggcagggaagcatccagcgtgtagtgcctgaaacatgacacattactcctaccaatatgtgacctgtctctcctgctctaggtcagttttctaagactcctggtctctgtatgaactttactgcactattccactggccagtagatagcctgtccccagtgctacttgacctcttggcgacttttacgtctttgccttgtaatccggcagttctccatccatttttaaagttgaagtcctcactttttcactgaacaaaagagcaaactctgaattggtatcggtatattatgctttagctgctcaaaaagaacctgtcctggaggaacctatactggcgaagagccaccaggttctccagtcagatctcacagtgagtttctccactcctttctacttcaacatt

SEQ ID NO: 261 - DNA, 446 bp, Homo sapiens
acaacgatctgggcatgggacagaatttaataaacagaagcatcttgaagctgctgataagggacattcaccagcacaaaagcctaaaactagcagtggaacaaaaccatcagttaaacctacaagcgctacaaagagtgattcaaatctaggaggacattctattcgttgtaaatcaaagaatcttgaagatgacactttgtcagaatgtaaacaggtgtctgataaagctgtttctctccagcgaaagcttcggaaagaacagtcattgcattatggttcggttcttcttataactgaattaccagaggatggttgcactgaagaagatgtgagaaaattatttcaaccatttgggaaagtgaatgatgtcctaattgttccatatagaaaagaggcttacctagaaatggaatttaaagaggcaattactgcaattatgaagt

SEQ ID NO: 262 - DNA, 278 bp, Homo sapiens
gtgaaaactacccctaaaagccaaaatgggaaaggaaaagactcatatcaacattgtcgtcattggacacgtagattcgggcaagtccaccactactggccatctgatctataaatgcggtggcatcgacaaaagaaccattgaaaaatttgagaaggaggctgctgagatgggaaagggctccttcaagtatgcctgggtcttggataaactgaaagctgagcgtgaacgtggtatcaccattgatatctccttgtggaaatttgagaccagcaagg

SEQ ID NO: 263 - DNA, 90 bp, Homo sapiens
taataaaaatacaaaaaattagccaggcgtggtggcatgcgcctgaggtgccagctactcgggtggatcatgagatcaggagatcgagac

SEQ ID NO: 264 - DNA, 448 bp, Homo sapiens
  misc_feature 299: n = A,T,C or G
actcaaggtttaaccttaaaattaagatttccttaaccttaaccttaaaattgatattatattaaacatacataatacaatgtaactccactgttctcctgaatattttttgctctaatctctctgccgaaagtcaaagtgatgggagaattggtatactggtatgactacgtcttaagtcagatttttatttatgagtctttgagactaaattcaatcaccaccaggtatcaaatcaacttttatgcagcaaatatatgattctagtgtctgacttttgttaaattcagtaatgcagnttttaaaaacctgtatctgacccactttgtaatttttgctccaatatccattctgtagacttttgaaaaaaaagtttttaatttgatgcccaatatattctgaccgttaaaaaattcttgtttcatatgggagaagggggagtaatgac

SEQ ID NO: 265 - DNA, 314 bp, Homo sapiens
acagtagggaacaaccatttttccgtgttcacaatttgtctttggcggatagtatcagcaccactgtgagtgacataggcagcatcttatggtgcaatttcaagggcagagggcaggtgtcccctgcaccacattccctccccacagctaccgcccctaccccagggacattctacacaaacacaccagcatttggcttaagggatccttgttggaatgcaaacggctccgattctgagtagaatttcagaagcctttttgagtcgttactcggggaaggggagaagatgagggatgggaagatctagtcctgt

SEQ ID NO: 266 - DNA, 319 bp, Homo sapiens
  misc_feature 116, 117, 131, 229, 236, 256: n = A,T,C or G
actaatgtatcaacttattctgcaggatagacctcctacataccaaccccaggattacagtttttcttctgtttaaaactaggatgttcagtagaaatggggtttctatttgcagnnttgttacaaaccantttcctctcacaaatagctaatatctaagaccatgactcaaactatcaaataggaatagaaagagaacacacagttttgaacgcaaatagaaaaggcntcctaanaatgttctttataggccacntgcttgctttcagtaaaaataacattttctcaaaacttttcaatctgatttttaatagcttgt

SEQ ID NO: 267 - DNA, 432 bp, Homo sapiens
acaggacagtaaaggaggcagttaatctgtaacaaacatcagtggttgggaggcaggaggtctggtctcttgatctttcctagtcatttacagaacaagaacagtgaggaaaagagttaatgtgttgtctaagaaggagaaatcaccaacgttcaagttgccagggcttaacttcctccttgacataataaatgtagagggtcttgaaatcctattttcttttacatgatcctatatatcaacttgaatagaactaatgtttacttttgaagaaaaatttaaattagaatggttgtcttaagtaaaggaggaagctttaaacatgatcctatatatcaacttgaatagaactaatgtttacttttgaagaaaaatttaaattagaatggttgtcttaagtaaaggaggaagctttaaaagtattctaatggt

SEQ ID NO: 268 - DNA, 214 bp, Homo sapiens
actaaaatgtattgtttggtgacaagaactgcaataaaaagataaatgattttctgaatgttgtggcaaagcagtctatttccactgcaatttctgctactattagcttaaaaattgctgagacaaaggacaaccttctgattatgctgctgagatctaatgcaaagtcctctcagagcttcactacacataaacattccagttataaaaatgt

SEQ ID NO: 269 - DNA, 365 bp, Homo sapiens
  misc_feature 11, 147, 169, 185, 265, 268, 270, 343: n = A,T,C or G
ctttaattgtnaagtaaaagctataaagcagtatttttcttgacaaatggcatatgttttccacttctttgcatgcgtttaagtcagtttatacacaaaatggattttattttttagtttaactgtgtttctccgacagctcacctntccctgaccagccagccatttncttcctgtgctccacnttcttctgtgtgattaaaataagaatattatttttggaaatatgcaactccttttcagagatcaggagggatttatgtancancntatttttactgcaaaagtaattcactggaaaaaaaatgtaatttgtaagaaagctttatttttatctcagctntatgtaaagttaaagttactgt

SEQ ID NO: 270 - DNA, 401 bp, Homo sapiens
actgcctcttactacaagatttgcttacccgggagttagatagcaagcatgggaaatgcctggcacacagaatatatggaattagtgttaggattttagtaacttcacagtcggaaagaggaaaataggaagagctgttcgtatagggtagactataggagagaatgcaaattttgaaagctacatcatcaaggattaaaattttgctgctagctttgtctctataataatgtggtcatctagtcttaatgcttattccttcaaaaagttcattcttttcatttttctccctttgtgcctaatgctcaatctcttgcactagtttcggaagtggtcttcttttatgtctgccctatatgctgttgttaaaactggtattgaaatgcacttttattcatggt

SEQ ID NO: 271 - DNA, 210 bp, Homo sapiens
  misc_feature 76: n = A,T,C or G
acttctattgggctggttccttcaccatttccaaaggggttctggagaccttgcaggaacaggaacagcaccttanccaagagggttccaggcctcctgcctaggcctgggctctcctcgttaggttcccaggaataaattgagttcccattggcagcacttgcaggtattgctagtccacggcaagatctgtcttagggattttctggt

SEQ ID NO: 272 - DNA, 468 bp, Homo sapiens
  misc_feature 432, 466: n = A,T,C or G
acatttacaaagatgcgttcaaatagtgctctaagagttttgttcagtggctcacttcggctaaaatgcagaaatgcatgctgtcagcgttggtatttcacattcaatggagctgaatgttcaggacctcttcccattgaagctataatttatttggaccaaggaagccctgaaatgaattcaacaattaatattcatcgcacttcttctgtggaaggactttgtgaaggaattggtgctggattagtggatgttgctatctgggttggcacttgttcagattacccaaaaggagatgcttctactggatggaattcagtttctcgcatcattattgaagaactaccaaaataaatgctttaattttcatttgctacctctttttttattatgccttggaatgggttcacttaaatgacattttaaataagntttatgtatacattctgaatgaaaagcaaagctnaa

SEQ ID NO: 273 - DNA, 446 bp, Homo sapiens
caggaattctgaattaagcacagagttgaagtttatacccgtttcacatgcttttcaagaatgtcgcaattactaagaagcagataatggtgttttttagaaacctaattgaagtatattcaaccaaatactttaatgtataaaataaatattatacaatatacttgtatagcagtttctgcttcacatttgattttttcaaatttaatatttatattagagatctatatatgtataaatatgtattttgtcaaatttgttacttaaatatatagagaccagttttctctggaagtttgtttaaatgacagaagcgtatatgaattcaagaaaatttaagctgcaaaaatgtatttgctataaaatgagaagtctcactgatagaggttctttattgctcatttttttaaaaaatggactcttgaaatctgttaaaataaaattgt

SEQ ID NO: 274 - DNA, 367 bp, Homo sapiens
ttttttttatcagtagcctatttcagatttattaaaaaacacataggtaacgagtcagagctttggctaggaatgatttggaaaagaactgaaggcataattccacaggacattcacagttgtgtgctagagacagagaggagcaggaaagtgttttagaagcatttgcggtggacaatggaaggcccggcttcatcgtattcctgtttgctgatccacatctgctggaaggtggacagagaggccaggatggagccaccgatccagacagagtatttgcgctccggaggggcaatgatcttgatcttcatggtgctgggtgctagggccgtgatctccttctgcattcggtcggcaatgccagggt

SEQ ID NO: 275 - DNA, 466 bp, Homo sapiens
  misc_feature 12, 13, 263, 451: n = A,T,C or G
actctgaggctnntaggagggtaaaatagagacccagtaaaattgtaataagcagtgcttgaattatttggtttcggttgttttctattagactatggtgagctcaggtgattgatactcctgatgcgagtaatacggatgtgtttaggagtgggacttctaggggatttagcggggtgatgcctgttgggggccagtgccctcctaattggggggtaggggctaggctggagtggtaaaaggctcagaaaaatcctgcgaanaaaaaaacttctgaggtaataaataggattatcccgtatcgaaggcctttttggacaggtggtgtgtggtggccttggtatgtgctttctcgtgttacatcgcgccatcattggtatatggttagtgtgttggttagtaggcctagtatgaggagcgtttatggagtggaagtgaaatcacatggctnggccggaggtcatta

SEQ ID NO: 276 - DNA, 242 bp, Homo sapiens
acctaagatcattttcctgaaagccaaaccaaacaacgaaaaacaagaacaactaattcagaatcaaatagagtttttgagcatttgactatttttagaatcataaaattagttactaagtattttgatcaaagcttataaaataacttacggagatttttgtaagtattgatacattataataggacttgcctattttcatttttaagaagaaaaacaccactcattttataaaatatagt

SEQ ID NO: 277 - DNA, 149 bp, Homo sapiens
  misc_feature 70, 71, 73: n = A,T,C or G
accattggtggccaattgatttgatggtaagggagggatcgttgacctcgtctgttatgtaaaggatgcnnanggatgggagggcgatgaggactaggatgatggcgggcaggatagttcagacggtttctatttcctgagcgtctgag

SEQ ID NO: 278 - DNA, 112 bp, Homo sapiens
  misc_feature 80: n = A,T,C or G
ataaaaatcaatcagtaggaatgtcattttaaaaagtaaaatagtgggacggttgtggtggctcatgcctgtaatcccancactttgggaggctgaggtgggtggatcattt

SEQ ID NO: 279 - DNA, 208 bp, Homo sapiens
actgtaattttattttaatgtattttgatttatgattatttattagttttttttaaatgcttgttctaagacatttctgaatgtagaccattttccaaaaaggaaactttattttcaaaaacctaatccgtagtaattcctaatcttggagaataaaaaagggcggtggaggggaaaacattaagaatttattcattatttctcgagt

SEQ ID NO: 280 - DNA, 172 bp, Homo sapiens
  misc_feature 13, 14, 73, 96, 97, 122: n = A,T,C or G
accattggtggcnnattgatttgatggtaagggagggatcgttgacctcgtctgttatgtaaaggatgcgtanggatgggagggcgatgaggactnngatgatggcgggcaggatagttcanacggtttctatttcctgagcgtctgagatgttagtattagttagttcctg

SEQ ID NO: 281 - DNA, 516 bp, Homo sapiens
accacgaagtcaatacttctcagtgagtagggaaagcaaaatacttcctcaatagcagggaaaaaaaagcaagagaaagactgaatttagaaaaaaaaagacaactgttaaagaaaatgtttaagtcaactttttttttttttttagacaaggatattgcaactatcacttaaagtctggtggcacattctttagtaggtccttaaggcaatatatttaaattaatttacaatttgatttgatgttaaagtttttttaaacatcacctcaaaatagatgctcaaaataatgccctcacaatagcctttgtaaaatgtattcagatgtttgataaaaaataatggtggctttatattacagtagtgctcattagcaccactataattaagggtctaccaagtttccagcaaaaccacctgtttcttaggagtttcaccataaaagatcacattggctttaaccagttgggtagcgcacaaaaaagcaatttttatcagttgctggtgctttttttgt

SEQ ID NO: 282 - DNA, 390 bp, Homo sapiens
acttagtcacctgcaaaaggagttaggaaaaacatttttaagactgcttgctggacaaaagactttcaagattccttacttgtggctaaaacattgctcaaaaaggataaacccacataagggccatggttgcctcttctttttcttattcagaaacaaaatcaccccccatacaccaaaaaacaaactgaaaaccaaaaacaacaacaaaaaaacaaaacccaaagccaaaggaatcccaatttgattcctatcaacccctcatgggaaagactaggagtctctgccatcgacctctagacaggacttccctggagtctgcaaaagcaagaacccgagagataagtgcctgtcacttacgtggccaattcagatgggttgcctaattat

SEQ ID NO: 283 - DNA, 198 bp, Homo sapiens
  misc_feature 105, 106: n = A,T,C or G
acagttggaatccatggcagttttatggaggccaaatatatcagatgaataggctaatttccctgagttgctggccttattagtccctactctgttgccccctgnntacctaatgcatgttcaaaaggtatagttttcatcacctgcttgatcttgattttcagacagcatcaaatcagttgcaaaacaaatccaagc

SEQ ID NO: 284 - DNA, 290 bp, Homo sapiens
acttattcgaatgatatacttgtgagctgttccatggtcataatcatccccaggagctgtccaagtcagattaatgagactgcccccgtgaatttccgccttcaggtcggtgatttggccaggtgggaagagatcaggtatgggagcatttgggacatcagaagccacaaatgagcctcccgaggatgttctgctgaaacacacttgcttgtgttgaacatcatccttattaatttcaggtcttggtggattccattgtatttcatcattctcaatccagccaggtatgt

SEQ ID NO: 285 - DNA, 551 bp, Homo sapiens
  misc_feature 518, 524: n = A,T,C or G
acaaagaagcagaagtgtaattttccttttcccagcatgacgaaaaattggagttctgccatttgagcagcttactggaaagatccagccttacttgtcttaaattgtccaacaaggtgactcattgcccggcaaacacttttaccctcagatgttactcatgatattataaaatatgaggccagtgctcaggtttgcatcataagtgagctatccctgaagggttttaattacttatttggcgtcctgattatatttgcaaacttctttataaaaggtgaaaaaagcacacaaaagagagggtgtcttcatattaaaccttcacaaccttcatgatttcataggattattttggaaatatagcacttgactttatgaaaggatctgggctaggtatattaggggtagttgccaataacctgaagaagctggcattgtttacagaaacagatcaagggctatgatttatgtcattttatagcagcagtatctattaatacatgccttttcctcccatncacctnccccgcacacacacaaaagatgacctg

SEQ ID NO: 286 - DNA, 409 bp, Homo sapiens
actaacaaaggaaaaaactatactgaagaagaagatcgttttctgatttgtatgcttcacaaacttggatttgacaaagaaaatgtttatgatgaattgcgacagtgtattcgcaactctcctcagttcagatttgactggtttcttaagtccagaactgcaatggagctccagaggagatgtaataccttaattactttgattgaaagagaaaacatggaactagaagaaaaggagaaggcagagaaaaagaaacgaggaccaaagccttcaacacagaaacgtaaaatggatggcgcacctgatggtcgaggaagaaaaaagaagctgaaactatgaatatgtttttgtttcataatcactaactttaaaccagtagttctttaatttacgggtcttcataagatgt

SEQ ID NO: 287 - DNA, 331 bp, Homo sapiens
  misc_feature 12, 292: n = A,T,C or G
acttatgtgttnatctaacagttcacttccatttttctagtctggattttttgagtatttaggaaagagagctattaaaaactctggggatttctcaatgtgactaactctaatttttctaattataactgcctttaattaacataatattaacttttgctgaggtttatgagattttctcaccccacatcgctcccctttttttaaaaaggactgttttgctagtgtgataatgaataggtaagatatgagataattgcaacattgtctagttctagtatggtaactattnttgaaatggtattgaaaaataccgttaattcaaattgac

SEQ ID NO: 288 - DNA, 509 bp, Homo sapiens
  misc_feature 11, 12: n = A,T,C or G
acctgtgggtnnattacctatgggtttatatcctcaaatacgacattctagtcaaagtcttggtaatataaccaatgttttcaaatgtattctgttatacaaagagcagatttttattgaacttgtgcaataactatattaccatacaatataaatattcatgaatagtttcccaagtctggagcgaccacatagggagaaaatgtaaatgtctcaatttttgttcacaaaagtatattttatcaaattgctgtaagctgtggatagcttaaaagaaaaaaagtttcctgaaatctgggaaacaagacatttaaagaatcagcaaaatttcaaataaaaaattatgaaaatattatcctcattagttcatttagtcccatgaaattaattattttctctgcttgatcttggtggacagtttcatgaagctgtcagttagttcattaaagttttggaaattctcaggacagtgcagtggtatcagaaacttgtattcaagagtacctcgg

SEQ ID NO: 289 - DNA, 257 bp, Homo sapiens
acccttccgctcacctatgcccatgtgcctgcccttccggcgggccaaggtgtttttccggcatcgagcccgggaatggaccgtcacaggcttgcggatgatcagcccatctttgatgagcttccggatctgctgacgggagttggcattggcgatttcattggtctcattggggtctaaccagaccttcttcttgccacagcggaggacactagaggcgagcctcttctgaagcctgagcatactcatggctgcgg

SEQ ID NO: 290 - DNA, 75 bp, Homo sapiens
  misc_feature 14, 25, 30: n = A,T,C or G
accttctcaaaccncatttcatgangcggnctgatcgaacatttgaccccttctctgaaactcctgttgatggtg

SEQ ID NO: 291 - DNA, 226 bp, Homo sapiens
  misc_feature 20, 57, 141, 184, 206: n = A,T,C or G
tttttttttttttttttttncgctctaaagatactttttatttaaatattttatgangatacatatacaaatataatcttccaaaaaacaaatgtaaaactaatacaaatcactttttcaggaacaaagaaaatcatttanaaaatgtgattatgctaaaagaggcaggttaggtttccaaggnctgctcaaggtggaagcttaanaccaacttttgtttgagtac

SEQ ID NO: 292 - DNA, 513 bp, Homo sapiens
  misc_feature 18: n = A,T,C or G
cttcttcagcacatgccnaagctgttcctcacggcctgtgagacaagagcatcttggatgtaggacaatggaagagttagatgccttattggaggaactggaacgctccacccttcaggacagtgatgaatattccaacccagctcctcttcccctggatcagcattctagaaaggagactaaccttgatgagacttcggagatcctttctattcaggataacacaagtcccttgccggcgcagctcgtgtatactaccaatatccaggagctcaatgtctacagtgaagcccaagagccaaaggaatcaccaccaccttctaaaacgtcagcagctgctcagttggatgagctcatggctcacctgactgagatgcaggccaaggttgcagtgagagcagatgctggcaagaagcacttaccagacaagcaggatcacaaggcctccctggactcaatgcttgggggtctggagcaggaattgcaggaccttggcattgccacagtgcccaa

SEQ ID NO: 293 - DNA, 524 bp, Homo sapiens
  misc_feature 63: n = A,T,C or G
acttacaaccacaatagcatactgtataatttagtggacttagttatttcaaaagatattatnccacttccctgctaaatgaaattaatcatcacctttgactttcaagaggtgaaaatagcgtgtaataaagcatatcttttagtcatcaggcctactgtgaaaagcaaatacagactgtatatattatatactagctgttattttttgcttcaattgtattttatctcttttgttaaaaaaacatgatttcatcttgtaactgaactgcacatataatatcagagaaaatcttctaatggcatgacttgtaaaatctctaccccaacaaattagtttgatatctaggagttaccttatctgaaacataatgagttatgttctacagtgtctgcaatcaaactttaaacaatcaggtccctctttcagtttagtatgttgttatactgaatacatgagtgttatggaaaagatttaggtctcataaatgggtgaagaaatttgtcatctacagaactaattca

SEQ ID NO: 294 - DNA, 430 bp, Homo sapiens
acaaaattctttctcttgaattagtgcacacagagttgcctgtgtgcagtgaggaatgaatccatagacaaggagtcgatcattgagaaacaaggacggcacctgggctggggcctgcagggcctcgggcacatctggattgagttgccgccatttgacggagacagagtggcaactcggagaacatagcctggtcatttggtcttctatctgttttctccaactatgcttggattttgcattaaaatattcaaatactccggcaccacactgggacaaaatccttaagacgtgacgatttgctgtagaaccgataccgcaggcgaataacctggtgtgcgggcggctcctcttcacgagctgtaatgtcaggctctcatcctggaggtgcccatcagacaccaggaggatgttccgtgaccctcgagca

SEQ ID NO: 295 - DNA, 213 bp, Homo sapiens
acatggtggtcaccactgagcccctcacccaggccgtggtagacaaaactctccttctggtggtgctgttactcggggtgacccttttcatcacagtcttggttttgtttgccctgcaggcctatgagagctacaagaagaaggactacacccaggtggactacttaatcaacgggatgtatgcggactcagaaatgtgaggggggcgggggc

SEQ ID NO: 296 - DNA, 140 bp, Homo sapiens
accacagtttaatagttttgtgatagttcaataactgtcatttgctttaatctacagaattttaaaaaatctaaataaaactattacgctggccagataaaatagtaacaaaaaaagtaaagagatataaaacaaactgt

SEQ ID NO: 297 - DNA, 130 bp, Homo sapiens
  misc_feature 8, 9, 11: n = A,T,C or G
accgcggnngntaaacatgtgtcactgggcaggcggtgcctctaatactggtgatgctagaggtgatgtttttggtaaacaggcggggtaagatttgccgagttccttttactttttttaacctttcctt

SEQ ID NO: 298 - DNA, 405 bp, Homo sapiens
acatttaaggcttttaaatgtggaaaaaaaaattaaaaccaaagaacccccaaatccaaacccctaaccaacacaagtagtatagcaatgttaagcatctcctatttctgatgcttatttggcgcaacttccagtgtcaaaacccaaataattcctaaactaaaaagattagtttagtgaaattttaattacataaattcttcaaagcataaacttggaatttttgtcttggaaatgttataaaatttttaatagcaaaacataggaataaaaacatattaacaaaatgtattcaatcatttacattacaaacaaggaatctgcagttcattgttgtagcctgacaaaagaaatcatatctaccattaagaatctatgcacaatgtgattgcaaatatgtacagt

SEQ ID NO: 299 - DNA, 554 bp, Homo sapiens
  misc_feature 403: n = A,T,C or G
accgtgggagcagggaaattggttttttaaaaagcaactgtttaattgcttaaataagctatgtattaaatctgtctccagttagggctatcttcctagcataggccccttaagtagcatgggggatatattttttgctataacgtaaaaattttcctttaaccactgccctctcctttctccttcaaggttctttccccctcagttttgttgttgtcttactctggagatgccaagtgtattttttctttctatgtaattttagattcgccttacaatgtaaatcttcacattggagataatattggttggaccttgcccatcttcactctagccttcgtatttgtgaaggactcagccaccttccttcttcaccccatgcttctcaccaaatttttgttgncattgagggcacttggataactcaagttgatatttatagctgatcaatctatatgtgtcacagaactatgctgcctaaagtgatcttggctccttaatggtccttttggccccttggatagttaacagctgagtaattctaatctcttctg

SEQ ID NO: 300 - DNA, 269 bp, Homo sapiens
  misc_feature 209, 215, 221, 226, 235, 238, 242, 246: n = A,T,C or G
acagcaaagcgacccttggtgtcatagatcagacggaaattctctcccgtcttgtcaatgctgatgacatccatgaatccagcagggtaggttatatcagttcggaccttgccatcgattttaatgaaccgctgcatgcaaatcttctttacttcatctcctgtcagggcatacttaagtctgttcctcaggaaaatgatgaggggganacactntctcancttgnggggaccgnctngatngacnaggagcaaacacaccggtcaatt

SEQ ID NO: 301 - DNA, 234 bp, Homo sapiens
accaacaacaatatgtggtgcttcagcctgcagtttttgcatttcatttcgaacatttgttccaccaatgcaggcatgacaagtggctcccatatagtctccaagtgccagaattaccttttggatctgttgagccagttctctggtgggggccaatactagtgcttgggtctccttgaactcaatctccaactgttgcaggatggaaatagcaaatgtggctgtcttgccagt

SEQ ID NO: 302 - DNA, 496 bp, Homo sapiens
accctcttcaagaatcggatggatgtcgttttgaagggcgacaatcttcctcagtatagaggggtgaacattcggagattgctcaacggtagcatcgtggtcaagaacgatgtcatcctggaggcagactacactttagagtatgaggaactgtttgaaaacctggcagagattgtaaaggccaagattatgaatgaaactagaacaactcttcttgatcctgattcctgcagaaaggccatactgtgctatagtgaagaggacactttcgtggattcatcggtgactccgggctttgacttccaggagcaatgcacccagaaggctgccgaaggatatacccagttctactatgtggatgtcttggatgggaagctggcctgtgtgaacaagtgcaccaaaggaacgaagtcgcaaatgaactgtaacctgggcacatgtcagctgcaacgcagtggcccccgctgcctgtgcccaaatacgaacacacactggt

SEQ ID NO: 303 - DNA, 453 bp, Homo sapiens
acccccagagacctcatagttgtccataagtgttttggaaggagcaggactcagccggaaggcattattaagtatccccagacctaatttctgcgccagagtagcccagtttttgtctggatcaggaatttctagtaacttatacagctgcagcttcacatcttcagccagctgtttcatgtctccttgtgctagtaaatcatcagatgtaaactctggctcatatggtttcccatttaatatgtcaaatacctgccagctggtggccatatctagaggcgtggttccaggcacaactccttcatcctctcctgcattttcccaagagtcatccaggtcatagagaggctcaaagttctccaccaggggatctgctcctgctgctttgagaagagctgccagcctggtggaccctctcccagctgctatatgcaggggtgtggttccatcgta

SEQ ID NO: 304 - DNA, 510 bp, Homo sapiens
acagtggttttcttttctttggtcggggagagtgggctggaatggagagtgaggcccacaaattacctgcagagacgtggaggcgtgagggagaacatgcttgttaaatatgcaggtagattaggagacaccaaacagagattcagacacagtaaggctgggatgagatcctcgaagctgtgttttaacaaactccactggagagtcccatattccctcaaatttgggaatcacgaccctgaaccaggttgggcctgaagcagtcaactgaattcactttttcggatagtaatttgttcccaggggcagtgacaaccatgatgttccaggtttggtctggcactctgccttgaacgtaggaagctcttgatgatttgtggaatgaatttttaaaaaattactatctggggaaaactagttggcatacagagttgtaggacagggtttatgtgattcatttgatattttagtattttgggtgtaaaagccaacaggcaaactttgccaggt

SEQ ID NO: 305 - DNA, 574 bp, Homo sapiens
  misc_feature 531, 551: n = A,T,C or G
accttttattcatgtgggaaatcaagtagtatcagaacttggtccaatagtccaatttgttaaagccaagggccattctcttagtgatgggctggaggaagtccaaaaagcagaaatgaaagcttacatggaattagtcaacaatatgctgttgactgcagagctgtatcttcagtggtgtgatgaagctacagtaggggaggcctactgaacttgacgcactggtatttggccatctatacaccattcttaccacacaattgacaaatgatgaactttctgagaaggtgaaaaactatagcaacctccttgctttctgtaggagaattgaacagcactattttgaagatcgtggtaaaggcaggctgtcatagagttatgtgttagtctcaggagtcttaacttttgaaatatgttttacttgaatgttacattagagattggtgtcagaattttaaaaccaaattactgctttttgaaacctcaaattatataatgtatcttatgtatgtgctttatattggtatttgngtatacattaaaataattcngaattatttaatctgatatgttg

SEQ ID NO: 306 - DNA, 540 bp, Homo sapiens
acatacttaaggcccagtggaattgtggaccacaaggctggaatgtggtgcggggaaaaatcacggtcataatgaaatgctagctcaagggctctgaactccaccatcaggcaatggtgagccactgtaggttttctgagatgggccatagtcagagctatgcttcgggaagatcacgatggcaataatgcatcacaaggatggagggggtgagaatagcttaaaggtaggaaaagcagttagaaggtcactggtaatagcagttgaggcttaattagtcagaatggaaaagaggatatggacatgagagatatcttagaggtgagaatgacagaactcggcaatcaccgcatttcataatgcatcaagtaggctgaccatatatcctggtttgcctgggatatgttttcctgatgtaattactaatggcacccttttactctcgaaaaggtttggacaataaactatataatcatattaattaggagcaattagtgaacagaatcaaaggtgactccaagattttaaacctggattagt

SEQ ID NO: 307 - DNA, 541 bp, Homo sapiens
acacaatggtttattaaaggaatgtatggcccacatcaacctagcaaggattctactggtaaaccttcccatggccaaaggaaaaacaagcaggagttgagtggctggggtggggtgcaggcaatggagagagggcagaagggtgtagaagctgaagggggctagaagcttactcctgagtttcttccttctgtcttcaaatctttacttcttatggccaaagacccagctgtttcataggctggagatgcactcttctagactgctcaagacagccagagacaggggaggagggaagaaggatactgtggaaagggatggcggggcaaacatttagagctagaagccactactgggccaatgctaaagtttctgtctctaagcctaaaaaagccagtgtagtagggcccttatcactcttagtttgctaggtttcccctctgaaataatgagcagatttagccaggctagcagaaaggaagaggacggggctgtgcaggagttagcagaatcttgattcttgctctatggtcggtacctc

SEQ ID NO: 308 - DNA, 566 bp, Homo sapiens
  misc_feature 507: n = A,T,C or G
acaacacagtgtcagggagtaggtgatttcttttccctatagttcatggtagtgatacctaaatgggtggcacaaaatgagttctggcttgttagactgatgcttctctttgctgcaggttttgaacaaactgtctggcttacaggggtgagggagagcacctgacaatgggtggtgatgtgcgtggagctcctaccctgaacatggcttcatgagatgtcctgtggtgggtcaatgctttatctcattccatggagccttcaagatgacaagaaaacatcaagagataggagcttgagataacaacattaaataacagaacatgtaacagggtaaaacactgagaagaaatgaaccaattcattgtttcctcccaagagagactgtgacactagttttaaaaagcggcaaagtcctttctctacatacatgcttggagatacccccaaacttagagattatgaagtaggccaggaaattcacttattgcacgatgcttggcagggnaacaaatgacgctgattttttcttttttaactgaactctctcaagaaaatgttttatga

SEQ ID NO: 309 - DNA, 319 bp, Homo sapiens
  misc_feature 14, 26, 31: n = A,T,C or G
accttcactatatnttactttattgntaatnaactgcatttttaaaagtagagattggtcttctcttatgtatacttatatccctctaaatttaaatccatcttgccatgttttgtatttaacttgaagtgatctaattaatgagaaaaagaggtattttaaaattaaggtgcatccaaaagggaagcgtaaggatacagagagatctggaaaccttgccttgagagacgtaatcgaaagaacctaggacacgtgccctgaaaatgagacaaggaagacatgtgagaaccatctgcatgtttgcaaagtctgtcgctgg

SEQ ID NO: 310 - DNA, 418 bp, Homo sapiens
acttgtttcaccatacttcattcagaccagtgaaagagtagtgcatttaattggagtatctaaagccagtggcagtgtatgctcatacttggacagttagggaagggtttgccaagttttaagagaagatgtgatttattttgaaatttgtttctgttttgtttttaaatcaaactgtaaaacttaaaactgaaaaattttattggtaggatttatatctaagtttggttagccttagtttctcagacttgttgtctattatctgtaggtggaagaaatttaggaagcgaaatattacagtagtgcattggtgggtctcaatccttaacatatttgcacaattttatagcacaaactttaaattcaagctgctttggacaactgacaatatgattttaaatttgaagatgggatgtgt

SEQ ID NO: 311 - DNA, 275 bp, Homo sapiens
  misc_feature 207: n = A,T,C or G
ctggcagctctgaaccctgagtccaacacagctgggctggacatatttgccaaattttctgcctacatcaagaattcaaacccagcactcaatgacaatctggagaagggactcctgaaagccctgaaggttttagacaattacttaacatcccccctcccagaagaagtggatgaaaccagtgctgaagatgaaggtgtctctcanaggaagtttttggatggcaacgagctcaccctggctgactgcaacctgttgccaaagttacacatagt

SEQ ID NO: 312 - DNA, 83 bp, Homo sapiens
  misc_feature 10, 13, 22, 23: n = A,T,C or G
acgcttctgnccncagccctanntccttcggcttcacatcaatgatgaccaatacggaattaggacagtatcttttcatgagt

SEQ ID NO: 313 - DNA, 413 bp, Homo sapiens
  misc_feature 171, 172: n = A,T,C or G
cacaagctcaggcatcgttgaagcatctacacgcgtccacagcagtactggctcaccacgcacaacactgtcccctgccagctccacaagccctggacttcagggagaatctaccgccttccagacccacccagcctcaactcacacgacgccttcacctcctagcaccgnnacagcccctgttgaagaatctacaacctaccaccgcagcccaggctcgactccaacaacacacttccctgcacagctccacaacttcgggccacagtgagaaatcaacaatattccacagcagcccagatgcaagtggaacaacaccctcatctgcccactccacaacctcaggtcgtggagaatctacaacctcacgcatcagtccaggctcaactgaaataacaacgttacctggcagt

SEQ ID NO: 314 - DNA, 357 bp, Homo sapiens
acacaatggtttattaaaggaatgtatggcccacatcaacctagcaaggattctactggtaaaccttcctatggccaaaggaaaaacaagcaggagttgagtggctggggtggggtgcaggcaatggagagagggcagaagggtgtagaagctgaaggggtctagaagcttactcctgagtttcttccttctgtcttcaaatctttacttcttatggccaaagacccagctgtttcataggctggagatgcactcttctagactgctcgagacagccagagacaggggaggagggaagaaggatactgtggaaagggatggcggggcaaacatttagagctagaagccactactggg

SEQ ID NO: 315 - DNA, 419 bp, Homo sapiens
accaggaagaaacatattgccgagtggatgccgccgcgcagcgtgtttgcttgaggcagaagcttcagcatctgctgggataactggaggaagaaatatgaagccttagcggctttacccgggaagcgagtttcgagatggcggctcagcggatccgagcggccaactccaatggcctccctcgctgcaagtcagaggggaccctgattgacctgagcgaagggttttcagagacgagctttaatgacatcaaagtgccttctcccagtgccttgctcgtagacaaccccacacctttcggaaatgcaaaggaagtgattgcgatcaaggactattgccccaccaacttcaccacactgaagttctccaagggcgaccatctctacgtcttggacacatctggcggtgagtggtggtac

SEQ ID NO: 316 - DNA, 99 bp, Homo sapiens
tctagtccagaatacaccaaaaaaatagaaaacctatgtgctatgggctttgataggaatgcagtaatagtggccttgtcttcaaaatcatgggatgta

SEQ ID NO: 317 - DNA, 473 bp, Homo sapiens
acttatttcaacaattcttagagatgctagctagtgttgaagctaaaaatagctttatttatgctgaattgtgatttttttatgccaaattttttttagttctaatcattgatgatagcttggaaataaataattatgccatggcatttgacagttcattattcctataagaattaaattgagtttagagagaatggtggtgttgagctgattattaacagttactgaaatcaaatatttatttgttacattattccatttgtattttaggtttccttttacattctttttatatgcattctgacattacatattttttaagactatggaaataatttaaagatttaagctctggtggatgattatctgctaagtaagtctgaaaatgtaatattttgataatactgtaatatacctgtcacacaaatgcttttctaatgttttaaccttgagtattgcagttgctgctttgt

SEQ ID NO: 318 - DNA, 505 bp, Homo sapiens
tttttttgaaaaagtcatggaggccatggggttggcttgaaaccagctttggggggttcgattccttccttttttgtctagattttatgtatacgggttcttcgaatgtgtggtagggtggggggcatccatatagtcactccaggtttatggagggttcttctactattaggacttttcgcttcgaagcgaaggcttctcaaatcatgaaaattattaatattactgctgttagagaaatgaatgagcctacagatgataggatatttcatgtggtgtatgcatcggggtagtccgagtaacgtcggggcattccggataggccgagaaagtgttgtgggaagaaagttagatttacgccgatgaatatgatagcgaaatggattttggcgtaggtttggtctagggtgtagcctgagaataggggaaatcagtgaatgaagcctcctatgatggcaaatacagctcctattgataggacatagtggaagtgagctacaacgta

SEQ ID NO: 319 - DNA, 547 bp, Homo sapiens
  misc_feature 234, 311, 488: n = A,T,C or G
ttttttttttttttggaggaaaacccggtaatgatgtcggggttgagggataggaggagaatgggggataggtgtatgaacatgagggtgttttctcgtgtgaatgagggttttatgttgttaatgtggtgggtgagtgagcctcattgtgttgtggtaaatatgtagagggagtatagggctgtgactagtatgttgagtcctgtaagtaggagagtgatatttgatcagganaatgtggttactagcacagagagttctcccagtaggttaatagtggggggtaaggcgaggttagcgaggcttgctanaagtcatcaaaaagctattagtgggagtagagtttgaagtccttgagagaggattatgatgcgactgtgagtgcgttcgtagtttgagtttgctaggcagaatagtaatgaggatgtaagtccgtgggcgattatgagaatgactgcgccggtgaagcttcagggggtttggatganaatggctgttactacgagggccatgtggctgattgaagagtatgcaatgagcgatttta

SEQ ID NO: 320 - DNA, 372 bp, Homo sapiens
acggccagggctattggttgaatgagtaggctgatggtttcgataataactagtatggggataaggggtgtaggtgtgccttgtggtaagaagtgggctagggcatttttaatcttagagcgaaagcctataatcactgcgcccgctcataaggggatggccatggctaggtttatagatagttgggtggttggtgtaaatgagtgaggcaggagtccgaggaggttagttgtggcaataaaaatgattaaggatactagtataagagatcaggttcgtcctttagtgttgtgtatggctatcatttgttttgaggttagtttgattagtcattgttgggtggtaattagtcggttgttgatgagatatttg

SEQ ID NO: 321 - DNA, 229 bp, Homo sapiens
gccgtggcaccggcatcggctgacactgctgcctccagctagttatttcgtcctcttccgttcttcacccctacaccttggaggtgaacttctcacctgagggctgtaaagactcgtttgaaaatggagagccaagaaccaacggaatcttctcagaatggcaaacagtatatcatttcagaggagttaatttcagaaggaaaatgggtcaagcttgaaaaaacaacgt

SEQ ID NO: 322 - DNA, 295 bp, Homo sapiens
accattggtggccaattgatttgatggtaagggagggatcgttgacctcgtctgttatgtaaaggatgcgtagggatgggagggcgatgaggactaggatgatggcgggcaggatagttcagacggtttctatttcctgagcgtctgagatgttagtattagttagttttgttgtgagtgttaggaaaagggcgtactactcgattgtcaacgtcaaggagtcgcaggtcgcctggttctaggaataatgggggaagtatgtaggagttgaagattagtccgccgtagtcggtgt

SEQ ID NO: 323 - DNA, 560 bp, Homo sapiens
accttgatcaggctgtgcatcacagtaattccgttctaggtaggcagagttgatctttgtctcatctgccaggctgcgggctcttcaagggcagggaccttgtcatagtcatttttattttcacagtgcttggaacatggtggaaaatgaatgttggaattattggagtaatataatttgtatcaaatgtccttttgaattaagagatttagttatgtttactaagaatgtaaactttgaattggtttgcattttaacaattaggatggtttattgatgtgaattttgaaatgtagaggtataatgttaaattattttatactttatggaaatcaagtgaaatgtttgaaaaaatgccgccattatcctctggtattttctactctctggaattatgtgctgtaaatgatcggctgtaaatgtgaggcacaccacccacccctgtgtggaaagtgttgtggcgcttcctgccacccacccacctctctaccgtcgctccttgtgacacttgtctgtcgtctcccatccaaactccaagcttacagctacctcagtacctc

SEQ ID NO: 324 - DNA, 602 bp, Homo sapiens
acaaatgatgaccaataattttatctttcttcctttgaatatactgtaaattctatgaaaaattcatttataaaaacaaagcaaagaatagcataaattttattttctttcgcaatgttatattttaatagaagaaaaaaactacctttctgataactgtaacctaagtaaaacaaatattttacatataatttgaggcaaagtaatgagtttcttgaatcaactggagaaattagtcacattacctatgtcatgcataaatgatggtaagaagaaaaaaaaagcatctgatcatgtatgagaactgtctccgttcaaattatgagaaataaaatgaaaattgctaaagggagaaaatgaataaaatatgatttaaaaaaaaccatatgggaattgcatagatgagaaaaaaattttcattctagggatctaaaagtaatgtttttagctttaaaaacatacacacacatatataattgagacatgtctatcatcttggctaaaattttaatatatgtctccccaaaagcattttaaatatgaaagccaagattcttaagctcttgatgatataccagaagggtatactttattattttttt

SEQ ID NO: 325 - DNA, 322 bp, Homo sapiens
  misc_feature 12, 13: n = A,T,C or G
acgatgtctagnnatgagtttgctaatacaatgccagtcaggccacctacggtgaaaagaaagatgaatcctagggctcagagcactgcagcagatcatttcatattgcttccgtggagtgtggcgagtcagctaaatactttgacgccggtggggatagcgatgattatggtagcggaggtgaaatatgctcgtgtgtctacgtctattcctactgtaaatatatggtgtgctcacacgataaaccctaggaagccaattgatatcatagctcagaccatacctatgtatccaaatggttctttttttccggagtagtaag

SEQ ID NO: 326 - DNA, 87 bp, Homo sapiens
acaattaagctattattgactatactcacccggttgtgctatcaaatactaggtcttatttatactttctaactacatagtttttgt

SEQ ID NO: 327 - DNA, 269 bp, Homo sapiens
accccctccccatctgcacaccctgtgttcaaaccagtcccagctcctgtcatgttattggcttctgagtatctgtattaatagttgttcctgccagcatatgaagatgaacaaatacacaactgagagagatccagggattttaatccacagatgccagagcttgctgggatgtagtcagaaatcaagctgaactcaggagttcacagtctttcctgtaatgatggttgggaggtgagggaagtcagaggccttttctaggatctttc

SEQ ID NO: 328 - DNA, 259 bp, Homo sapiens
acgtgggtgaggggatggaggaaggcgagttttcagaggcccgtgaagatatggctgcccttgagaaggattatgaggaggttggtgtggattctgttgaaggagagggtgaggaagaaggagaggaatactaattatccattccttttggccctgcagcatgtcatgctcccagaatttcagcttcagcttaactgacagatgttaaagctttctggttagattgttttcacttggtgatcatgtcttttccatgtgt

SEQ ID NO: 329 - DNA, 482 bp, Homo sapiens
ggaaaagattgatcgccgttctggtaaaaagctggaagatggccctaaattcttgaagtctggtgatgctgccattgttgatatggttcctggcaagcccatgtgtgttgagagcttctcagactatccacctttgggtcgctttgctgttcgtgatatgagacagacagttgcggtgggtgtcatcaaagcagtggacaagaaggctgctggagctggcaaggtcaccaagtctgcccagaaagctcagaaggctaaatgaatattatccctaatacctgccaccccactcttaatcagtggtggaagaacggtctcagaactgtttgtttcaattggccatttaagtttagtagtaaaagactggttaatgataacaatgcatcgtaaaaccttcagaaggaaaggagaatgttttgtggaccactttggttttcttttttgcgtgtggcagttttaagttattagtttttaaaatcagt

SEQ ID NO: 330 - DNA, 579 bp, Homo sapiens
acctgataaaactttaaccagggaagcattaaacacagtgcagcagcttttgcccaggcttctaagttcctgccggcagcatttatcaatgtaagaactaggatgcttcctgcagtggcactaccttcccctagagctggagcatgctgcttggccttaagccccagcatgatgaggcttccctcctgccaggtcagtaaaagttagagagctcagaattgggtcttgcctgggtgcaggtggcagggtttgctgaaacccctaaagagaagtcaccaagggaggcaggtaatgaatgtttccagaatcagtcggatactcatagcaatttctggctatctttcaaatgttgaatttctggatgctgagagggactttgatttgatatcattaaatccaggacagtcccaagaagtgcttggagtctcggctctgacagcccaagaagggaaataacttgtattaaggaacaactatgagccaggccctgagctgtctcttagataataaaacagatggggagtggaagagtcatttgcttcaagttatacagctaggaaatactcaagccaaatcttg

SEQ ID NO: 331 - DNA, 501 bp, Homo sapiens
acctgtgggtttattacctatgggtttatatcctcaaatacgacattctagtcaaagtcttggtaatataaccaatgttttcaaatgtattctgttatacaaagagcagatttttattgaacttgtgcaataactatattaccatacaatataaatattcatgaatagtttcccaagtctggagcgaccacatagggagaaaatgtaaatgtctcaatttttgttcacaaaagtatattttatcaaattgctgtaagctgtggatagcttaaaagaaaaaaagtttcctgaaatctgggaaacaagacatttaaagaatcagcaaaatttcaaataaaaaattatgaaaatattatcctcattagttcatttagtcccatgaaattaattattttctctgcttgatcttggtggacagtttcatgaagctgtcagttagttcattaaagttttggaaattctcagacagtgcagtggtatcagaaacttgtattcaagagt

SEQ ID NO: 332 - DNA, 503 bp, Homo sapiens
acctgtgggtttattacctatgggtttatatcctcaaatacgacattctagtcaaagtcttggtaatataaccaatgttttcaaatgtattctgttatacaaagagcagatttttattgaacttgtgcaataactatattaccatacaatataaatattcatgaatagtttcccaagtctggagcgaccacatagggagaaaatgtaaatgtctcaatttttgttcacaaaagtatattttatcaaattgctgtaagctgtggatagcttaaaagaaaaaaaagtttcctgaaatctgggaaacaagacatttaaagaatcagcaaaatttcaaataaaaaattatgaaaatattatcctcattagttcatttagtcccatgaaattaattattttctctgcttgatcttggtggacagtttcatgaagctgtcagttagttcattaaagttttgggaaattctcagacagtgcagtggtatcagaaacttgtattcaagagt

SEQ ID NO: 333 - DNA, 195 bp, Homo sapiens; identical to SEQ ID NO: 8

SEQ ID NO: 334 - DNA, 390 bp, Homo sapiens
actgcgactgtgggctgcggtcattcacgagacaggctcgtgttgttgggggcacggatgcggatgagggcgagtggccctggcaggtaagcctgcatgctctgggccagggccacatctgcggtgcttccctcatctctcccaactggctggtctctgccgcacactgctacatcgatgacagaggattcaggtaccattggtggccaattgatttgatggtaagggagggatcgttgacctcgtctgttatgtaaaggatgcgtagggatgggagggcgatgaggactaggatgatggcgggcaggatagttcagacggtttctatttcctgagcgtctgagatgttagtattagttagttttgttgtgagtgttaggaaaagggcgt

SEQ ID NO: 335 - DNA, 60 bp, Homo sapiens
  misc_feature 10, 13: n = A,T,C or G
gtacaagctnttntttttttttttttttttttttatttttttttttttttttggttaaaa

SEQ ID NO: 336 - DNA, 649 bp, Homo sapiens
  misc_feature 619, 632: n = A,T,C or G
actggtcgaaaacggccatcaaagaagaaaagtccaatgtatggattaacatgtaaaaatgtggcaacatcgaggtagttaggtaaagttgcagacagtccaagaatccttatcatactctgtgtggattccacctgccgtaaagtaccaccatttgaaaaaaaaaaaaaatcagtggatttccataacacagaaaatgcatggacatgcatctacagtagagttaaaaatttcctgtgactaaaaaattaaaaactgaatcaccagtagcaaatgtatagtcaatggctatgacaagaacagatcctgccgagctcataaatgcaattattgtcttttttgctttataaaaaagacattacatattttattgcattattctcctaataaaaacatactaccacgtagctctccccatccccattctttgcttccagatttttatagaaaataactgttttagtctggccttggaaagtgaacccaccagcaccaccttcacctactcactcttcaattcaatatgcacatagcaaaagccaacacttcaaatctcttgcccacatcaaaaaaagtagtttcaggagaaaaaacattaataccagttgataaaaataanggcataaaagctntgagagagatagctctg

SEQ ID NO: 337 - DNA, 411 bp, Homo sapiens
acggccagggctattggttgaatgagtaggctgatggtttcgataataactagtatggggataaggggtgtaggtgtgccttgtggtaagaagtgggctagggcatttttaatcttagagcgaaagcctataatcactgcgcccgctcataaggggatggccatggctaggtttatagatagttgggtggttggtgtaaatgagtgaggcaggagtccgaggaggttagttgtggcaataaaaatgattaaggatactagtataagagatcaggttcgtcctttagtgttgtgtatggctatcatttgttttgaggttagtttgattagtcattgttgggtggtaattagtcggttgttgatgagatatttggaggtggggatcaatagagggggaaatagaatgatcagt

SEQ ID NO: 338 - DNA, 278 bp, Homo sapiens
  misc_feature 14: n = A,T,C or G
tttttttgctctanagggggtgctatagggtaaatacgggccctatttcaaagatttttaggggaattaattctaggacgatgggcatgaaactgtggtttgctccacagatttcagagcattgaccgtagtatacccccggtcgtgtagcggtgaaagtggtttggtttagacgtccgggaattgcatctgtttttaagcctaatgtggggacagctcatgagtgcaagacgtcttgtgatgtaattattatacgaatgggggcttcaatcgggagt

SEQ ID NO: 339 - DNA, 446 bp, Homo sapiens
acttaaactccagaaagaaaaagctaggaaacagaagtagagaggaatggaaaaaaacaaaaaaacccaatacctctgccatcttgccccatcataacccaaatagcatcaaagtggcagagatgggactaaagttaaagcaagcatcaaagttattacttttagggtaatgggatgaatttgaagagcactatgtcaaccaaatactaaacttcatggaataactgtgtttgtgtttctgtggaggagttgcggttttgtttgttttaatttggcccacgctgccccaatggaggaaattttaagataatcattaataaggcaacagcttccaggattaaaatacctataccatctatacggagttacaatgaggacaagacccacatagaccacaaaggaaaccgggaccagaagcttccagtgcattttcacagatcgttggt

SEQ ID NO: 340 - DNA, 323 bp, Homo sapiens
accttcataaggtggtatggggggttggggtcaggccctgaacatcgtcctacttgagaatctgtcaggggaaaaagtcaaggggagcaggaggaagagccaggagggccagaggcagagaagagatggagtcttaggggccagggtgagcgaggggtccagggcctagaggtgcttcctgggggcgggggaatgcagccagtgtccccctcccctcttccaccccagctccagccctggtcttgtcttttcatccctcttccccacgacagaagaagttgtggccctggccatgtcatcgtgttcctgtgtcccctccatgt

SEQ ID NO: 341 - DNA, 501 bp, Homo sapiens
acctgtgggtttattacctatgggtttatatcctcaaatacgacattctagtcaaagtcttggtaatataaccaatgttttcaaatgtattctgtcatacaaagagcagatttttattgaacttgtgcaataactatattaccatacaatataaatattcatgaatagtttcccaagtctggagcgaccacatagggagaaaatgtaaatgtctcaatttttgttcacaaaagtatattttatcaaattgctgtaagctgtggatagcttaaaagaaaaaaagtttcctgaaatctgggaaacaagacatttaaagaatcagcaaaatttcaaataaaaaattatgaaaatattatcctcattagttcatttagtcccatgaaattaattattttctctgcttgatcttggtggacagtttcatgaagctgtcagttagttcattaaagttttggaaattctcagacagtgcagtggtatcagaaacttgtattcaagagt

SEQ ID NO: 342 - DNA, 338 bp, Homo sapiens
aggtactaaagggagaaagaaaaggaagagatcaccctcagtgcttctttgctgctccttttctttagacatttaaccccttttagttcagaaaatgtaaactagcactagcatggtcttttaaggattttgttcatatcagtcatatatctgttattattatgtatttaaagattgtgtttattcccacgatttggagaagcctagccaaaaaaaaaaaaaaaaaagattgtgtttatattattgctagaagatatgtgttgatgggaccaaaaaaagactggttaataaataaaaattttttctacactaattatatataaaccatattcacatgt

SEQ ID NO: 343 - DNA, 529 bp, Homo sapiens
gtgaatttgtccgtctccgacttctggagatttatttttttagatgaggtgttgctgtgttgcccaagctggacttgaacccctaggctcaagcaatccttccacctcagtctcccaagtagcagggactacagagtgatgatgcgggtgcgctggttggtgagacaggacagccggcaccagcgaatcagacttccacatttggaagcagttgtgattgggcgtggcccagagaccaagatcactgataagaaatgttctcgacagcaagttgaaagcagagtgtaacaagggatatgtcaaggtaaagcagagtttgaggaagaggcaaagaaccctggcctggaaacacacgggaagagaaagagatcaggcaacagtgattctatagaaagggatgctgctcaggaagctgaggctgggacagggctggaacctgggagcaactctggccaatgctctgtgcccctaaagaagggaaaagatgcacctatcaaaaaggaatccctgggccactggagtcaaggct

SEQ ID NO: 344 - DNA, 340 bp, Homo sapiens
  misc_feature 10, 11: n = A,T,C or G
actgagattnnccatggcattcataactgtcttcctaaaaacaaagcaatggctcaccaacgagccagccttcatgcttacatgtgacactgtaagtggaagtttagaaggatgtcctgacattaaaaagtagcctatcatcagattccagagctgaacagctgtgtttttctgtcagattttgattgttttggccttgcttgggaaaacctgcaggagtattgtatttttggcattgtagagcatttgagtagttggttcctttaaaaaggctttgaatactgtcctaaaaactcatccctaccactcacaagaaccaaagttttacctggctaatagt

SEQ ID NO: 345 - DNA, 291 bp, Homo sapiens
  misc_feature 27, 130, 167, 185: n = A,T,C or G
ttttttttttttttttttttgctctanagggggtgctatagggtaaatacgggccctatttcaaagatttttaggggaattaattctaggacgatgggcatgaaactgtggtttgctccacagatttcanagcattgaccgtagtatacccccggtcgtgtagcggngaaagtggtttggtttanacgtccgggaattgcatctgtttttaagcctaatgtggggacagctcatgagtgcaagacgtcttgtgatgtaattattatacgaatgggggcttcaatcgggagt

SEQ ID NO: 346 - DNA, 411 bp, Homo sapiens
acggccagggctattggttgaatgagtaggctgatggtttcgataataactagtatggggataaggggtgtaggtgtgccttgtggtaagaagtgggctagggcatttttaatcttagagcgaaagcctataatcactgcgcccgctcataaggggatggccatggctaggtttatagatagttgggtggttgatgtaaatgagtgaggcaggagtccgaggaggttagttgtggcaataaaaatgattaaggatactagtataagagatcaggttcgtcctttagtgttgtgtatggttatcatttgttttgaggttagtttgattagtcattgttgggtggtgattagtcggttgttgatgagatatttggaggtggggatcaatagagggggaaatagaatgatcagt

SEQ ID NO: 347 - DNA, 375 bp, Homo sapiens
acctaatcttcaagcttaaaatttaagttaaaattaatctctattttgtgggcaccctttagtgaactaaaatctacatgaaaccttttggcttttgtgtagcaggaaatacccacgttttgggtcaattagtgcagatgggagcagcagaggagctacaccagacagcaaagcaagactagagcaaacgagaaggaccagcccctagcccctctgtgctcccgggaggacctgggctgttttcacctaattacacccaactttgcttaaaagtcgtataatcagacactattctcagcacaagtttgataaatatacaaaaaccaggttcaatttcatcgtgagtttctttccattctgatccttgtatccaat

SEQ ID NO: 348 - DNA, 378 bp, Homo sapiens
gaagaaggcaggggcccttagagtcttggttgccaaacagatttgcagatcaaggagaacccaggagtttcaaagaagcgctagtaaggtctctgagatccttgcactagctacatcctcagggtaggaggaagatggcttccagaagcatgcggctgctcctattgctgagctgcctggccaaaacaggagtcctgggtgatatcatcatgagacccagctgtgctcctggatggttttaccacaagtccaattgctatggttacttcaggaagctgaggaactggtctgatgccgagctcgagtgtcagtcttacggaaacggagcccacctggcatctatcctgagtttaaaggaagccagcaccatagcagagt

SEQ ID NO: 349 - DNA, 429 bp, Homo sapiens
accaaaccactccaccaagagccagaacaacgagcagaagggtgacactaatggcaaccaaaacagaggccagcatctcaacattctttatggggatctgcatgcccagcatcttcacattgccttcttcaatgtctctggggggcactgctttttcagtctctttggtgatgacggtgagagggcttaagtgttctgttcgagaaaaaacagtgaagagggtctccatgccagcatggacatggtcagtcacatggcagtgcatcagccatgtcccagggttgctggccaccatctccacaacctcaaaagtccctgggaacagatccaccacatctgcccggtagttctcgccattccgatagaggaagctctctgcatgaaagtggatggtgtgtagatccacatcttggcccatggccagcatgt

SEQ ID NO: 350 - DNA, 339 bp, Homo sapiens
actgccaggggacagtgttgtgtctgtggagcctgggctgctgtgggaagctgtagattcctgactgacgcctggcatggtggtgctggcaggtaacagtgttgtatccgttgagcctgggctgctgctgtagacggtggtagattcctcactgaggcctggcgtggtggtgctggcaggtgacactgttgagtgagtagaacctggttggctacgggaggtggtggattcttcaccgacgcctaggcttgtcatactggcaggtgagagtgttgtggttggtgatctggggctgctgtagaaggtggtagatgcctcactgaggcctggtgttgtggt

SEQ ID NO: 351 - DNA, 594 bp, Homo sapiens
actagacgagtattgcgcccgaaatggagtccgggggtgtcaccgacatctctgctacctcagagacttgcttgaacgggcagaaaatggcgccatgatcgaccccacccttcttcactacagctttgccttctgtgcatcccatgtccatgggaacaggcctgatggaattggaactgtgactgttgaagaaaaggaacgttttgaagaaatcaaagagaggctccgagttctgctagaaaatcagattacacattttaggtattgctttccatttggtcgacctgaaggtgctttgaaagctactctctcactcttggaaagggttttgatgaaagatattgttaccccagtgccacaagaggaggtaaaaacagttatccgtaaatgtctggaacaggctgcgttagtcaactattctcggctctcagagtatgccaaaatcgaagaaaatgtaggccggttaatcactcctgccaaaaagcttgaagatacaatacgtcttgctgaactagtcattgaagttcttcagcaaaatgaggagcaccacgcagaggcctttgcgtggtggtcagatttaatggtggagcatgc

SEQ ID NO: 352 - DNA, 590 bp, Homo sapiens
acatcagaactcatgccaacagtctttatgatgggattaaggtggacaagatctcctaagatctgtgaatgggattaaggtggacaagatctcctaagatctgaaaagaaaccttaatacgctcatatggttggagtgttaagtgaacctctgattttgtcagggtttttctacgtgtaggcgtgaatagggggcaccccttcaaaactgtacattaaaaatatgttatatacgtaaatgctaagggcatcagttttgtatttttttttatttaacattttcatttcattggaaatttgaggtaattttgctaagtcttaaaggctaattcactacagttcttcccatttaagtttattacaaaaggaaatttagaataatttgaactctttattggataattgagatattgataactaacctcctataggaagtttgtatttttaaaatttatgaaataaagagaaatatttaaatacttgcgaagccatagctttaagtaattaggatgtttttactttgacacctattcttagtaatgtaacaacaaatattttaagttagcaactaatacaggtacgtacagcatt

SEQ ID NO: 353 - DNA, 196 bp, Homo sapiens
acatatttttacagtaaaatgctttatggaactagttttagagccctctatggctttaaggccttgcttactgcctgcaaattttgagaaatttaaaaataagcattctaacacttttattcccacagaaaaattccaagtcaaattatcaaatcaaacacaaaaataagtcttacctcttgtataagcatgttgt

SEQ ID NO: 354 - DNA, 143 bp, Homo sapiens
acctttgtgcagtagaagctagtgagcatgtgagcaagcggtgtgcacacggagactcattactatctgccaagagtagaaagaaaggctggggatatttgggttggcttggttttgattttttgcttgtttgtttgttttgt

SEQ ID NO: 355 - DNA, 447 bp, Homo sapiens
acattcattggaacaacatagccaatttattaatctattctagaatattaatagctttcatacattctccacaaacagaccaatcactgccacacaattcatctttagaaagtttttaagcatcatgatttgtagcttactgtcattgaaaacaaaacaaataattctttatttataccaaacaaatctttgatgggcacttagtttcctttatggcaatactagatttctagttatcaaaaatattaaagtaattataaagtttaaaaccctgcaacatttacagaaaccaacagtattaccactttcacttttaagctaaattagataatgtttgcatgaaatagctttcattttttcctacctggagatgtcttgtttttaaattattaaattgtcaaactaaaaatactcctcccttttcagaagctagtgaatagagagggt

SEQ ID NO: 356 - DNA, 195 bp, Homo sapiens; identical to SEQ ID NO: 8

SEQ ID NO: 357 - DNA, 106 bp, Homo sapiens
acaggactaggaagcagataaggaaaatgattatgagggcgtgatcatgaaaggtgataagctcttctatgataggggaagtagcgtcttgtagacctacttgcgc

SEQ ID NO: 358 - DNA, 165 bp, Homo sapiens
cgactttccaacatttttgttattggcaagggcaacaaaccatggatttctcttccccgaggaaagggtatccgcctcaccattgctgaagagagagacaaaagactggcggccaaacagagcagtgggtgaaatgggtccctgggtgacatgtcagatctttgt

SEQ ID NO: 359 - DNA, 557 bp, Homo sapiens
  misc_feature 505, 510, 512, 523: n = A,T,C or G
acaatacagtgttcaatagtttttattgcagtgatgtttttccaataatttaagtaattctcttcctagtataatacagttttcataaataatgtttacttgctttctttatattttcaaataaaattaaaatgctcgagcacttcctttcagaaagttataaaattaaaaataattattttaaatgctcattcaaatgtgtctgtatacttgctatgcccctttttctataattccaaactgagactgatttttcagagatttttaactttaataattttaaatctagaatcaagtgaaacagatatgttaaatactgagtctagttttcttccatcttatggagcttcatggaataagaaactaatctagtgcaaatgaagattaaatatttctgggtgatggagagatagtcaacaaatttatttatccatcctctgcacatcagtccactggagcaggagttctacacattaaaaatgtaatgggatcagcctagcattgnttggngntcttttgttgnattttttttagaatgggggtgggggcctaagtgt

SEQ ID NO: 360 - DNA, 213 bp, Homo sapiens
  misc_feature 15, 173, 180, 181: n = A,T,C or G
actacagtctggctnacacgagtgagacctcatctcaaaaaataaaaaaaagtaaaaaataattttaaaagagtgatttaaaaagtaagcatactgatacaggttcccagtcccttacccacagttctaaaatcccaaatctctgaaagccaaaacctttttcattattttgngggaaannaattatagcatcaaaacctgaatttatgtggt

SEQ ID NO: 361 - DNA, 391 bp, Homo sapiens
  misc_feature 11, 14, 36, 230, 238, 253, 346: n = A,T,C or G
agcgtggtcgnggngcgaggtaccctaccttcaccnccctctttgtaagttggtgacttgcatctgtggccttgaatattttattatcacatgtggcataacagtatccacactttttagttctttattttttttttttattttgagcaattctcctgcctcagcctcccaaatagctgggattacaggtgcatgccaccacacccagctaatttttgtatttttagtanagacaggntttcaccatgtttanccaggctggtctcaaactcctgacctcagatgatccgcctgccttggcctccccaaagtgctgggattacaggtgtgggagccaccaatgccntgacccacacacttttttacttgtatagatgatttttggccttgg

SEQ ID NO: 362 - DNA, 366 bp, Homo sapiens
actcactggaggtctgagaaccttaaaatgctgtcgctacattttttttcccttccaattcagaaagcaaagtgttaccatagtaacaggactatgttaaagatgtctattttgcatagcacataaaaagtaggtttcctgtttactcttcttgtttcccagaagggagggggtgcgggggaggacaggaggagggagccacagctaaatcgtcacctgaagcccccagtgtgacctgctggattctagagaacacttcagcccataaggcaagggaaaacccaacgcagaaataaacgccggaacatcttgtcattgttaaatatatgatgcagtcacatcggcttcctgctctgtggggctcgt

SEQ ID NO: 363 - DNA, 320 bp, Homo sapiens
acttggggtggcgggtcaggctgcggagctcgtggatgccgtgtgtgaactggcacttgtccccgtactctgaggcttgtaggagggtaaaatagagacccagtaaaattgtaataagcagtgcttgaattatttggtttcggttgttttctattagactatggtgagctcaggtgattgatactcctgatgcgagtaatacggatgtgtttaggagtgggacttctaggggatttagcggggtgatgcctgttgggggccagtgccctcctaattggggggtaggggctaggctggagtggtaaaaggctcagaaaaat

SEQ ID NO: 364 - DNA, 492 bp, Homo sapiens
actcaagcaccatactgtagtttgttttaaacagctggaagtcaccaattgttcaaaaacagtgtgtattacataatcaatttcaaaagattatgtaaagaataaatgaggatatttgtaaggtgcttagtgtgcttatgtatgtgtgctaaatgtgctatgccttacacatagaggacacaattttaatgtggataattggtattcaaattattactcttaaatcacattctcttttctcaaagcaaaaagaataaagaaaaacgcaatacattctagtcattgaacatttatagacatttaaacccaaggggaacactagaggtcatttggttcaagttccttgttttactggtgagaaaactgaagaccagagaggccaagtgacaggtccacagtctcatagggagtaagggagtaatggacaaagattagaaaccgcagctctcaactctttgactagtgtcttgtagaggaagcctttcatgctgt

SEQ ID NO: 365 - DNA, 175 bp, Homo sapiens
ccgccttctaggccgtaacggaattcctgaaggttggagactccatagaagtggacaaaggctgctgccaccaccaggacatggaaaatctgatgagactggaaccatatgtcaaattttccaggaaagaagcgctcaggaattcgagcagcataaaggccagctccagtgatgt

SEQ ID NO: 366 - DNA, 279 bp, Homo sapiens
ttttttttgctctagagggggtgctatagggtaaatacgggccctatttcaaagatttttaggggaattaattctaggacgatgggcatgaaactgtggtttgctccacagatttcagagcattgaccgtagtatacccccggtcgtgtagcggtgaaagtggtttggtttagacgtccgggaattgcatctgtttttaagcctaatgtggggacagctcatgagtgcaagacgtcttgtgatgtaattattatacgaatgggggcttcaatcgggagt

SEQ ID NO: 367 - DNA, 393 bp, Homo sapiens
  misc_feature 8, 30, 31, 33, 323: n = A,T,C or G
agcgtggncgcggcgaggtactctgctatnncnctggcttcctttaaactcaggatagatgccaggtgggctccgtttccgtaagactgacactcgagctcggcatcagaccagttcctcagcttcctgaagtaaccatagcaattggacttgtggtaaaaccatccaggagcacagctgggtctcatgatgatatcacccaggactcctgttttggccaggcagctcagcaataggagcagccgcatgcttctggaagccatcttcctcctaccctgaggatgtggctagtgcaaggatctcagagaccttactagcgcttntttgaaactcctgggttctccttgatctgcaaatctgttcggcaaaccaagactctaagggcccctgcca

SEQ ID NO: 368 - DNA, 396 bp, Homo sapiens
acctttgatgtgcctaatagtttcagatgtcttagttttttataaccatagttgattaggccaagaggcattcatttcttatttaagctggcaaaattagcaggaattagagaagtttaaaaagataaatggttttatgataatgttaaccatcttttgttagtaaatatgcgttctattattttaatcattgatgccttacaaaagaaaacatcttttctaataccctgaatatgtgctgttcttagaatcatctatggattcttttaaaggttgtttgtgaaattagttttccctttttagaatctcaggagtagtggggtaaagacatttcctgctgtcagtggataagacagagcttgttaactgttttggcagtagttaaaatcaaattgt

SEQ ID NO: 369 - DNA, 297 bp, Homo sapiens
ctcagagcccctccctgctaccaaggcccagctatggccccagggttgaaaagttatgagggtcagggcagtatctctctgcctatttattggggtgcctatttattggggatctgcattccccgctgcccaatcatttgcaatgccctaattagggcatcctgcccctcgccttttaggctcaggacggaaggtcagttgccatggttaccgaggaccctggttactctggtgctgtcctgttttactggaccccgcctcccagccccaggggtgcctgtgggggtccatttgggt

SEQ ID NO: 370 - DNA, 435 bp, Homo sapiens
  misc_feature 14, 15, 17: n = A,T,C or G
acatttgatgtggnnanatgactctaagaaatgctgaagtattggcattacatgtgtttactagtatgataatgttgattcaatctgaacaaaagataatataaaaataacccttcagagtttggacatttcaagttggtaataataaaaaataatatttaagaagatatatatatatatatatttagttttttccacttcattttacatgccactatattgactttaattgatatacagtattaagtttttaggtgccattatttttaaaaaattctatatttccaatgaacgatgttagattttacacagaacatattctctgcatgatttcagaaaagaaaatctaaaaaggtaatacgggtatttcaaataaaatcctttctggtatgaaaggctccattgattttattaagccttcctttaccttgtagt

SEQ ID NO: 371 - DNA, 506 bp, Homo sapiens
  misc_feature 19, 477, 498: n = A,T,C or G
caggtacaggtggtcttcnagggatagcacgaggtggtctgacaggactaacacttaccagcctctatgcactatataataactgggagcacatgaaaggctccttgctccaacagtcactctgaagattttgccaactcatgaatggaggacacttcagtagtcatctagatccttttataagacagtttggagttattctctctcttctacctacaattagtttgaaaaattggagattttgatttgctgtgatgaaaatcctggatggctgaccaagactggcacttgttccagccattagtgagttgaagccaaagccctttggtgactcactgagtactcgcccaactcccggccactccccgacatcttgtagccaccaaagggtgactgggctccaaacacatcatagcagttgacccacacagtgcccgcctggagggcctgggacaggtaattggccttgtccaaatnctttgtgaagacagctgcggncagcccgt

SEQ ID NO: 372 - DNA, 343 bp, Homo sapiens
caggagtctatattctgatcggagccggcgccctcatgatgctggtgggcttcctgggctgctgcggggctgtgcaggagtcccagtgcatgctgggactgttcttcggcttcctcttggtgatattcgccattgaaatagctgcggccatctggggatattcccacaaggatgaggtgattaaggaagtccaggagttttacaaggacacctacaacaagctgaaaaccaaggatgagccccagcgggaaacgctgaaagccatccactatgcgttgaactgctgtggtttggctgggggcgtggaacagtttatctcagacatctgccccaagaaggacgt

SEQ ID NO: 373 - DNA, 496 bp, Homo sapiens
  misc_feature 13, 17, 263, 419, 426, 457, 465, 483: n = A,T,C or G
actattgacccancgangggggcttcgacatgggctttagggagtcataagtggagtccgtaaagaggtatctttactataaaagctattgtgtaagctagtcatattaagttgttggctcaggagtttgatagttcttgggcagtgagagtgagtagtagaatgtttagtgagcctagggtgttgtgagtgtaaattagtgcgatgagtaggggaagggagcctactagggtgtagaataggaagtatgtgcctgcgttcangcgttctggttggctgcctcatcgggtgatgatagccaaggtagggataagtgtggtttcgaagaagatataaaatatgattagttctgtggctgtgaatgttataattaaggagatttgtagggagattagtatagagaggtagagtttttttcntgatagngttcactggataagtggcgttggcttgccantgattgtnaggggtaggagtcaggtngttagtattagga

SEQ ID NO: 374 - DNA, 515 bp, Homo sapiens
actggataaaagtaaacttcaaaccttagggcgggagcactaaaaccaaaatacatgtattatttatagaaaatattttctgttttaatcttttctttttaaacaaggactcatacttaaaaaaatgtttagcaaaaaaaaaaaaaaagttgagaacttttaatttattttaaggactgcaaatgccagtgtaatttttttaatttgcagtttctgtaaacaacttgtataatagaaaagcagagaaataaatttccctccccttcaagatgcacctcatgtttgttttaaggtatagcatttagtccagatttgagaaagtttggggtgaacaaggtaagaaagatttttttttttggcatcaaatctttctgcctgcctctcagcttgcttcagaaaatttaaaaaatcacaatagtaatcaaaacatacataacattgaaacagaaggaaatgctgtggaccacagaactccaagaattgtttaaaaaaaaaagtgctaccctgagaaaagt

SEQ ID NO: 375 - DNA, 196 bp, Homo sapiens
  misc_feature 17, 31: n = A,T,C or G
accattggtggccaatngatttgatggtaanggagggatcgttgacctcgtctgttatgtaaaggatgcgtagggatgggagggcgatgaggactaggatgatggcgggcaggatagttcagacggtttctatttcctgagcgtctgagatgttagtattagttagttttgttgtgagtgttaggaaaagggcgta

SEQ ID NO: 376 - DNA, 340 bp, Homo sapiens
  misc_feature 13, 207, 209, 261, 326, 329: n = A,T,C or G
acgtgtggcttgntcacttcgtggctaaggtaagaacgtgcttgtggaagacaagtctgtggcttggtgagtctgtgtggccagcagcctctgatctgtgcagggtattaacgtgtcagggctgagtgttctgggatttctctagaggctggcaagaaccagttgttttgtcttgcgggtctgtcagggttggaaagtccaagccgnangacccagtttcctttcttagctgatgtctttggccagaacaccgtgggctgntacttgctttgagttggaagcggtttgcatttacgcctgtaaatgtattcattcttaatttatgnaangttttttttgt

SEQ ID NO: 377 - DNA, 387 bp, Homo sapiens
acatcaccgacggctaccgggcctacctgccgtccaggctgtgtatcaaaagtttgtttattttatctaatgagacagtaaacatctggagtcatttgctgggtttctttctcttcttcaccctgggaatatatgacatgacatctgtgttaccttcagcaagtgcgtccagagaagattttgtaatttgttctatttgtcttttctgcttccaggtctgtatgctttgctctgtgggctatcatcttttttcctgccatcggtcagaaaaaacatgtcgaagatggatggcattagattatgcaggaatttctattggaatactgggctgctatgtctcaggagtattttacgcattttattgtaataactactggcgtcaggtgt

SEQ ID NO: 378 - DNA, 369 bp, Homo sapiens
acttctggaaaaaaatgcaaatggtttagccaggatctttcctgtctgattcgtcactattattatatctgatgatgcgaatggttggagcgattcaatcctaagtcattaatgagctattttataaacaccactgtctgaagatcttcatttacattttgctaaggatcacttcgctaacctcacaggcttgtgtcaacagcatgatttgcaggacttcagttacactcttataaacaacacggctgtattgttaatcggttaatattttataaagtgtaaatattttattatgttttgaagggaactattgattctaaattattaaacccctgagaaggactatttaaatgaaatatacaattaagt

SEQ ID NO: 379 - DNA, 193 bp, Homo sapiens
accattggtggccaattgatttgatggtaagggagggatcgttgacctcgtgttgtgtaaaggatgcgtagggatgggagggcgatgaggactaggatgatggcgggcaggatagttcagacggtttctatttcctgagcgtctgagatgttagtattagttagttttgttgtgagtgttaggaaaagggcgt

SEQ ID NO: 380 - DNA, 216 bp, Homo sapiens
  misc_feature 35, 36, 121, 126, 128, 147, 148, 150, 172, 178: n = A,T,C or G
ctcccccgtggtgtaggccacgtggtgaccctcannacgctggatcaccacacggtgcttgtcttccaacttcagctccgtcctccccatgaagatcttgatggccttggagcaggtgacncccgnantgccacaggggacgttctnngngatgatgctgaatgagcccagngagganttctggccgcagtagtcctgaacagccacgtaggagca

SEQ ID NO: 381 - DNA, 353 bp, Homo sapiens
gtttgaccagtcacagattcaggagttcaaagaggccttcaacatgattgatcagaacagagatggcttcatcgacaaggaagatttgcatgatatgcttgcttctctagggaagaatcccactgatgcataccttgatgccatgatgaatgaggccccagggcccatcaatttcaccatgttcctgaccatgtttggtgagaagttaaatggcacagatcctgaagatgtcatcagaaacgcctttgcttgctttgatgaagaagcaacaggcaccattcaggaagattacctaagagagctgctgacaaccatgggggatcggtttacagatgaggaagtggatgagctgt

SEQ ID NO: 382 - DNA, 340 bp, Homo sapiens
ggacttttttagacagatcttcatggcctgttcccaccccagttcatcatcatctcttttacaccaaaaggtctgcagggtgtggtaactgtttcttttgtgccattttggggtggagaaggtggatgtgatgaagccaataattcaggacttattccttcttgtgttgtgtttttttttggcccttgcaccagagtatgaaatagcttccaggagctccagctataagcttggaagtgtctgtgtgattgtaatcacatggtgacaacactcagaatctaaattggacttctgttgtattctcaccactcaatttgttttttagcagtttaatgggtac

SEQ ID NO: 383 - DNA, 195 bp, Homo sapiens; identical to SEQ ID NO: 8

SEQ ID NO: 384 - DNA, 270 bp, Homo sapiens
  misc_feature 200, 201, 217, 218, 243, 261: n = A,T,C or G
actcccgattgaagcccccattcgtataataattacatcacaagacgtcttgcactcatgagctgtccccacattaggcttaaaaacagatgcaattcccggacgtctaaaccaaaccactttcaccgccacacgaccgggggtatactacggtcaatgctcagaaatctgtggagcaaaccacagtttcatgcccatcnncctagaattaattccnntaaaaatctttgaaatagggcccgnatttaccctatagcactncctctagag

SEQ ID NO: 385 - DNA, 358 bp, Homo sapiens
  misc_feature 10: n = A,T,C or G
atggccccanccatagcatgggaggaaacttatagaaccattggcctatattgggttggatctattattatgagtgttgttgtttttgtgccaggaaacattgtagggaagtatggaacacgaatttgccctgcttttttcttaagcataccatatacttgtcttcctgtctgggctggtttcagaatctataatcagccatcagaaaattataattacccctcaaaggttattcaagaagcccaagcgaaagacctgctgagaagaccatttgatttaatgttggttgtgtgtctcctcctggcaactggattttgcctgttcagaggtttgatttgctttggattgcccatctgag

SEQ ID NO: 386 - DNA, 251 bp, Homo sapiens
  misc_feature 170, 202, 227, 234: n = A,T,C or G
tccagcaaaaccagaaatacgaatatatttttctgggctttcacatttgttgatttttattcgcgatctttttcaatacaatttacaccctcatccccatttccagtctgattatacaagtgctaagtggcagaaaggtctggaataaatacatcaaaaagaagaggcanagctgtgaaactaagttgcatgcaacaggttntatgagggtgggggaagtgtctganaagtaanagagagtaagacaatgt

SEQ ID NO: 387 - DNA, 313 bp, Homo sapiens
  misc_feature 13: n = A,T,C or G
ggagacggcctgngtgctggcgaagcggaggccggagttaatacacgaggaactcatgcaaaggaggggactttcggaaatccaaacttagagtgccttgtatttagaatccggaaggaaaaggaaatgaaatgtgaagaaactcatgcaccaaactcgaactggtaagaagactgttagaatgccctcggtaacacagaggctgagagatcctgacataaatccttgtttgtcggaatctgatgcttccaccagatgtctggatgaaaataactatgacagggaaaggtgttccacttacttcttgaggtac

SEQ ID NO: 388 - DNA, 580 bp, Homo sapiens
  misc_feature 546, 560: n = A,T,C or G
actccatctctttgactgaataggtcattgatcctatcaagggataacaatgtttttgccactggatgttgatgttcctatccaaatccacagcaagctggtgttgcaattttccagattcatgcagatccactgacttcagtgctgataacaaataggcaatcccaaaataaaaggaggatatagttaccaagattgagtagatataaagatagaagagatttgattggtataattaaataagctaatcatgtctaatttattataggtttagatgaggggatgtttttgaaaattatttgaacagtcaaaagtgttacgtagcatcttggattaagatggtggataggaggcaggactagcttgcagctctcactcagacaaacagagcagcctgtggagactcacatcatgaacttctgctccaagaactgccacaggaacataccaggaaagtcagaagaatccatagaccctttgaaggaacaggatcaccactgcaggctctctgagatgctgaaaaactgtgtccctagggcaagtttncatcctgcctgtangacagcagctgatgtgctct

SEQ ID NO: 389 - DNA, 379 bp, Homo sapiens
gaagaaggcaggcgcccttagagtcttggttgccaaacagatttgcagatcaaggagaacccaggagtttcaaagaagcgctagtaaggtctctgagatccttgcactagctacatcctcagggtaggaggaagatggcttccagaagcatgcggctgctcctattgctgagctgcctggccaaaacaggagtcctgggtgatatcatcacgagacccagctgtgctcctggatggttttaccacaagtccaattgctatggttacttcaggaagctgaggaactggtctgatgccgagctcgagtgtcagtcttacggaaacggagtccacctggcaatctatcctgagtttaaaggaagccagcaccatagcagagt

SEQ ID NO: 390 - DNA, 435 bp, Homo sapiens
ttgtaaacctaactatggtaatattttaaaaggtaaattatggtaaattattagctcataagaagaaaaaatctttcaactctaacgttaaggctgactgaattaaagtgtgctagagtgttctatattagtttgagaataattttataagatgaacgaggagagaacttattactgaactattaactttcaaaataatctgcattttcctttttccctaagtgttcatgctattctgtctgctaatacttcaggttaaaaccttcatcctttggtgtccatttttgtaaccttggaccattttaatgttttttctactggtaaactagatcatatattccaggtcatttggatttttattttacttgtcacatatatctagttttactagatttagaagacagcagtctgctttaatccttttgtatctaccgt

SEQ ID NO: 391 - DNA, 283 bp, Homo sapiens
  misc_feature 177: n = A,T,C or G
ttttttttttttgctctagagggggtgctatagggtaaatacgggccctatttcaaagatttttaggggaattaattctaggacgatgggcatgaaactgtggtttgctccacagatttcagagcattgaccgtagtatacccccggtcgtgtagcggtgaaagtggtttggtttanacgtccgggaattgcatctgtttttaagcctaatgtggggacagctcatgagtgcaagacgtcttgtgatgtaattattatacgaatgggggcttcaatcgggagt

SEQ ID NO: 392 - DNA, 441 bp, Homo sapiens
cttttctccaatacctgccaatacagaaaactattatcagttgttattgttatcccttgaaagcgagggtgacaaaaacaacaaaacaccgttataaacacatcaaaggttcattctgactgaggtaagactttccaagcccttgttagattaggccttataaaacttgtgtgcattataacctaagctgtgcaacctgtgaagccaagagtgaactgatgtttcatttatattttcatccaaatgacattatctgcacgtttttaaaatttaaaaacaaaggactatttaaaaatacagtttattaacaaacgtgaactactttctgttacattaggtgttccctagtgtttcttaatttctttttagaaagtgtatttttattagtatttttccggtgaacagaagatttgtttggatttaaacatttactaagacagt

SEQ ID NO: 393 - DNA, 481 bp, Homo sapiens
  misc_feature 16, 17, 18, 387, 409, 420, 448, 472: n = A,T,C or G
atttaaagcaatatcnnnagggcacccaattattgaatgagaaaattttcaattctggccatgagaaagaaaaaaaaataaacagccttctttttttttcctttgttttaaaactgtggttttttaaaaaagcaataattaactcagacctcactaaaaatcatttttgtttttatattgttatgtcataagctctattatgttattctaacaagtagcaatttcacaaaatttgtatgtagatgttaacgcacatttcctttgcttcttttattagactagtgttgactttggggggggacatttattcacaaatgagaagtaggcacaaagtaaaaaatggaaccatctactaacaaggatcctttaaaactgccaagggagctntaacttgaaggccacatcctanagatgggcagnccaaatagcacatgggcaaatttggcancatctttttatatggttgagtctnctgaatatt

SEQ ID NO: 394 - DNA, 460 bp, Homo sapiens
caggagttcaagactagcctgggcaacatgccgaaaccctgtctctaaaaaaaaaaaaaaaatttggccgggtatggtggcagtaggatcgctcaagcccaggaggtggaggttgcagtgagccaagatcacgtcactgcactccaggaagggcaacagagcaagactccttctaaaaaaaaaaaaaaaagaaagaaagaaaagaaaattaactttggtatttcaggttgtatttaaatggagacttaacatgaactatgttcataacacttgaccaaattaagtgtagatcgtctctttaataaagagatcatctggaactgcaatttctaactcatacatcattgctacaaaccttatttgtttactatttctcttccaaggaccatcagtcatcctttaaaattcatttcaagctctgaaaagatattttttgttacatgggcaatttacttttagt

SEQ ID NO: 395 - DNA, 573 bp, Homo sapiens
ttctttattttcaatatttgtcttattaatatttttcttattttataatgcaattacaacaatttaggagacaaaacaatataaacaaaagaatgttaaatagttttttttaaaaaatagcttgttgcttgcaagaaagtccatataatcttattcccccccaaatataattttatactttgcactaaaccaaaatagcttatggaaaattagtattaaatagctaaacacagaaaacctacagctataaataacataaaatacagtttaactttaatgtgatgcttaaacaaagcaaactatgatgcaatatgaatcaacttcattaattggacaagtccagtgaggcacaaattagataagcactaaaccctccatgatgtgcaagtgaaacctccaaccccagcaaggttctttctgttcttgggctatgtccaattccattccagaaaagccacagtttttacatgttcttgacttttttactgaggagacgcacaatatatttcacccaagtctgttttggatttgcgcacacagacaactttttctttgtgtgaaagatgatagcat

SEQ ID NO: 396 - DNA, 460 bp, Homo sapiens
acagctaaaggacaactcccgaaggtcaaatgaatacacacagtccgtgagtcagaaatctggagggctgtgtggacggagacattgctcccgctgttttgctgctgtgaaatgctcagtgaaacctaattgaatttgacaattataaattacatattgaaaccgtatagttcacctaaggaatagcaatgaaaacagtgaagacaccagaagccagagttcaggaaatgtcatattcacatagaaatactttaaatttttctcaaagctttattttctcttttttcaagaaaagctccagaccacccagttgcactggtggaagtccttttgggaagctgtactcttccatgactggcttttattctacattatatttgtgagattcatcagtatagttgtgtgtatttgtagatcttttattctcatttctgcatatattttattatgtgaatgtacc

SEQ ID NO: 397 - DNA, 61 bp, Homo sapiens
  misc_feature 42, 48: n = A,T,C or G
ggcttatcaatgccccattccacccaagcacacaagagctcnttatcnctaacatcactat

SEQ ID NO: 398 - DNA, 337 bp, Homo sapiens
actggaccagccaatcaataccacagacctgcctttccacattgactggaatgatgatcttcctctcaacattgaggtccccaaaatcagcctccacagcctcattctcgacttttcagcagtgtcctttcttgatgtttcttcagtgaggggccttaaatcgattttgcaagaatttatcaggatcaaggtagatgtgtatatcgttggaactgatgatgacttcattgagaagcttaaccggtatgaattttttgatggtgaagtgaaaagctcaatatttttcttaacaatccatgatgctgttttgcatattttgatgaagaaagattacagt

SEQ ID NO: 399 - DNA, 476 bp, Homo sapiens
  misc_feature 14, 425: n = A,T,C or G
acatttttttaggnctcttaaactttaatttcacacagtaaattttgaatctcataaggaagcatatttgaacctagtcaatttaatcttagtgttcccttgaaaactttttttccctacaaaattttaagtgaaaaatacaatagtaaattaagattacactggggaaaaaaatgcaggtatcactttactccattgttatctgacctagagcttaattaagttttagaaatatgtaataccttccatcattccatcatccttaaattctgttaccaaataatggctaatgttacaaaaagttatactccagagacccaaagcttgacatttacctaatgtatgagaaaatattaccaattaacaataaagaatgatcatatttttaacctcttttacatagcctaataactcaggcaaggccncaacgtctgtgctaaatttaaactgccaaatattgactgcagcaaacaaga

SEQ ID NO: 400 - DNA, 195 bp, Homo sapiens; identical to SEQ ID NO: 8

SEQ ID NO: 401 - DNA, 501 bp, Homo sapiens
gcaagtttgctgagctgaaggaaaagattgatcgccgttctggtaaaaagctggaagatggccctaaattcttgaagtctggtgatgctgccattgttgatatggttcctggcaagcccatgtgtgttgagagcttctcagactatccacctttgggtcgctttgctgttcgtgatatgagacagacagttgcggtgggtgtcatcaaagcagtggacaagaaggctgctggagctggcaaggtcaccaagtctgcccagaaagctcagaaggctaaatgaatattatccctaatacctgccaccccactcttaatcagtggtggaagaacggtctcagaactgtttgtttcaattggccatttaagtttagtagtaaaagactggttaatgataacaatgcatcgtaaaaccttcagaaggaaaggagaatgttttgtggaccactttggttttcttttttgcgtgtggcagttttaagttattagtttttaaaatcagt

SEQ ID NO: 402 - DNA, 579 bp, Homo sapiens
  misc_feature 16, 18, 27, 297, 320, 323, 436, 443, 462, 478, 532, 547, 559: n = A,T,C or G
gtgcggaggtgctccncncagagttgnttctcgagcagcggcagttctcactacagcgccaggacgagtccggttcgtgttcgtccgcggagatctctctcatctcgctcggctgcgggaaatcgggctgaagcgactgagtccgcgatggagaaaactttagaaactgttcctttggagaggaaaaagagagaaaaggaacagttccgtaagctctttattggtggcttaagctttgaaaccacagaagaaagtttgaggaactactacgaacaatggggaaagcttacagactgngtggttaatgagggatcctgcangcnaaatatcaagaggatttggttttgtaactttttcatccatggctgaggttgatgctgccatggctgcaagacctcattcaatttgatgggagagttagtttgagccaaaacgntgctgtngcaagagaggaaatctggnaaaaccagggggcttnatgtaactgttgaagaaagctgtttgttggcggaaatttaaagaaagatactgnggaacatcaccttanagattactttgnggaatatggaaaaaattgat

SEQ ID NO: 403 - DNA, 373 bp, Homo sapiens
acaatctcggctcactgcaacctccacctcccaggttcaagagattctcctgcctcagtctcccgagcagctaggaccacagatgtgcatcaccatgcctggctaatttttgtattttttagtagagatggggtttcaccatgttggtcaggctggtctcgaactcctgacctcaagtgacccgcccttgtcggcctcccaaagtgctgggattacaggcatgagccactgtgcccagcctatatagtgtgaagcttttaggaaaatcagagcagggtagacagctgttaaaaacaatgtttaaatggaataatgttgaatgtttacaggctgtaagaactattgtatacacaaaataatacacaaagtttgt

SEQ ID NO: 404 - DNA, 414 bp, Homo sapiens
accgtgaggccctagcagacgaggccgacagggccagagccaaggccagagctgaagccagtatgagggccagggccagtgctagggccggcatccacctctggtgagggttggtgaaaagttggccagtgggtccccgtgaggacgaactactgtcctgagtcataagtaatatgggtggggcgagggtcttatttctgtagaaatcgtgtgactttaaggatttagattttgtatcttatgttttgtaacatttaataattactgttaaaatgctgtttgtaaatgagattggtctactttttcctgtaggattttattgtagagttttgctggttttgtaaaatggatggaagaactttgtatttatactgtgattttgaacagattatgcaacattggaaggaaggctgt

SEQ ID NO: 405 - DNA, 293 bp, Homo sapiens
  misc_feature 9, 10, 11: n = A,T,C or G
aggaagcgnnnaaacaccatatcacagattgtctgtcagtaatctgctgttcagccaagagagttcaaagggagcagtttctgcatgtagggaagttggaagacacaaaccccacctcccctgggagcttgtaacaaagcagacagggatgcaaaaataaatgatgtcagcctgcagccaaactccagcatcccacaccgcagctgacccactgctcatcgcgagggcctgccaggagctggcctcccgcactacttgtgagtaaagtgaatatcaaataccaatcttagagt

SEQ ID NO: 406 - DNA, 201 bp, Homo sapiens
acattaaaatacagtgttattgacctaacacttgacccaacataaatattattaataaaatgggaatattaatattaaccaggcacactgttatccctgcccataagtttgatggcgccattcagacttgcggcaactctggatcccctgaggtaactctctcatattccttctttggttctttactttttcgatttctgt

SEQ ID NO: 407 - DNA, 496 bp, Homo sapiens
actattacctgaatgcttctattccttttttgatcttcgaaaagaattcaagaaatgttgccctggttcacctgatattgacaaactggacgttgccacaatgacagagtattaaattttgagaagagtagttcagtctctcgatatggagcctctcaagttgaagatatggggaatataattttagcaatgatttcagagccttataatcacaggttttcagatccagagagagtgaattacaagtttgaaagtggaacttgcagcaagatggaacttattgatgataacaccgtagtcagggcacgaggtttaccatggcagtcttcagatcaagatattgcaagattcttcaaaggactcaatattgccaagggaggtgcagcactttgtctgaatgctcagggtcgaaggaacggagaagctctggttaggtttgtaagtgaggagcaccgagacctagcactacagaggcacaaacatcacatggggaccc

SEQ ID NO: 408 - DNA, 510 bp, Homo sapiens
ctcaaaacaaatgataaccatacacaacactaaaggacgaacctgatctcttatactagtatccttaatcatttttattgccacaactaacctcctcggactcctgcctcactcatttacaccaaccacccaactatctataaacctagccatggccatccccttatgagcgggcgcagtgattataggctttcgctctaagattaaaaatgccctagcccacttcttaccacaaggcacacctacaccccttatccccatactagttattatcgaaaccatcagcctactcattcaaccaatagccctggccgtaccaagactgagaggccccctcccaggtgagctggatcttcaagaggtctcccaagtcctcctcggtgtagaccaggaaggtgttggtggcattctgctcgatccgctccactatttccagtggcagagtctgggaatctgcattagtgccataaagggtgacgtaaaaggtgggctcaatttctcccatgttct

SEQ ID NO: 409 - DNA, 462 bp, Homo sapiens
acctagaatttcatagtaaggcagactgtcaagaagagcatcaaagtgaagacattttctgtcaggcaaattttcagaaagtctcctttgcacccttactgaggaagtatcttgaggaaattctccagcaaaatgaggatgaaaaccaggaaagaagaagaaataggatccataaaacagtggaccttacttaggatgtctcattctagagtgacagccaaaagggtatctcaccctagagtgacagctatccagcagactaatttcagatgagagcatactgtctcgggctttctgggaagaatgtgcattcagtgccatagatagtatcattgaagagctgggatgcttgagaagattatttagtcaagaaaaaagaaagacaaatcaacaatatgtcaaaaaattcaggtccaattatagagcaaaataaaatgaggcatgattttgagttattcatga

SEQ ID NO: 410 - DNA, 215 bp, Homo sapiens
ccagcttgtgaaacgtgtcatcgaaggcagcctgtctcccaaagagagaactcttctcaaagaggaccctgcttactggtttttgtctgatgaaaatagtctggagtataaatattacaagctgaagttggcagaaatgcagcggatgagcgagaacttgcgaggagccgaccagaagccgacctcagcagactgtgcagtgagggccatgctgt

SEQ ID NO: 411 - DNA, 351 bp, Homo sapiens
acacctttaattgaaaaggtgagaaaagctccatactgtgatgctatgatttccccaaggcttaccttctataagtagtcactgataaagtgccattgacccgcatttgtttagaattatttcattaaaattggggtatgatctagcagtttataataaatatttatggataattttattggcttttaaaagatactgtaaaattgacatatctcaaaatggagttaatttatatttacaacaaaccaaacacaaacatcaattatggaattacagggtcacattttaattcctgaattttacagtttagcattaatatcaccacatgtatacaaatggtgtaaaacaagt

SEQ ID NO: 412 - DNA, 536 bp, Homo sapiens
acaaaggtaagtcccagctgctggaggggttgccacactggcgaggagatgtgagagatcgtggccatggaaggccctggcagccatccctggagccctcactccctcccactctgtgctttccccccctctcctccttctcctcctcctggccctcagcccagcatctcacaccctcagttttcaatccctggtaagattgctcaattctgttttgttgtgtggatttgagtttgattttggtagaagtgtagttgtgttttatgttcaggtgtctcttgatcacagtaacccatagtcccccactggggggacggtgggggaagactttgggaggattttacccagaatacttgccgcctgctttttgtcctccaggaaaccagaagcccgggtaattaggtaggccggggagcagcgttgagtcagatggaatgcaggagtgggaggcctgtgctgattagcccaagccctttgctgttacagaatgtccccaaaattgctatatgaaagcaacccttcgattcacatatgat

SEQ ID NO: 413 - DNA, 479 bp, Homo sapiens
acatttgaacacacggctgtgttaaagatgctgctaatgtcagtcactgggtgcactaaaggatctcttattttatgtaaaacgttgggattgacaagatagatctgacactctgttaagttaccctctgaagctacttcttgtgaaatactaatgacagcatcatcctgccaagcgaaagaggcaggcataagcaaggacaaattaaaagggggtaagagccttatcatgatgaggagtcttgttttgacatcttgggaaaagctgtccatagtgtgaagtcgtcaatttctcaccatggtttgcagtttgcctgtctctagttaggtgaagtctctgagtggcacacacctcaggcctgagggttttccctttaaattttcattgagttgtccatctccagcatatagggcttcaggagcagagcagaccttgtttttagtggttccatgggataaaatgggattggaggagctaga

SEQ ID NO: 414 - DNA, 383 bp, Homo sapiens
acctgcaatatatttggagtattatgtctttattgttgttaaaaagtttttattgaatgtatgaaaattatcaaattgtattcatcattattaacatgtcctggggaaggaagggaaactttctaggacagaagtcactttcagatgtcatgtatgtattgggtgttcaatcatatctaacactgttttgatttttgtgggaaaatattccaggaaacgctaattctctttagactccttgttcttttatgactacaatgaacatatgtctatgtgatagctaaagatatttttgaattgtatgtgtgcttaattatcggtaagtataaatatttgagaaaacacctggtctggatatttaaaaccctcataaacatgttggt

SEQ ID NO: 415 - DNA, 349 bp, Homo sapiens
  misc_feature 10, 11, 12, 51, 59, 168, 223, 261, 293, 302, 316, 326, 332: n = A,T,C or G
tttttttttnnntttttttttttttatttggtttcggttgttttctattanactatggngagctcaggtgattgatactcctgatgcgagtaatacggatgtgtttaggagtgggacttctaggggatttagcggggtgatgcctgttgggggccagtgccctcctanttggggggtaggggctaggctggagtggtaaaaggctcaaaaaaatcctgcgaanaaaaaaacttctgaggtaataaataggattatcccgtntcgaaggcctttttggacaggtggtgtgtggnggccttggnatgtgctttctcgngttacatcgngccatnattggtatatggttagt

SEQ ID NO: 416 - DNA, 305 bp, Homo sapiens
accattggtggccaattgatttgatggtaagggagggatcgttgacctcgtctgttatgtaaaggatgcgtagggatgggagggcgatgaggactaggatgatggcgggcaggatagttcagacggtttctatttcctgagcgtctgagatgttagtattagttagttttgttgtgagtgttaggaaaagggcatacaggactaggaagcagataaggaaaatgattatgagggcgtgatcatgaaaggtgataagctcttctatgataggggaagtagcgtcttgtagacctacttgcgctgca

SEQ ID NO: 417 - DNA, 129 bp, Homo sapiens
  misc_feature 11: n = A,T,C or G
acttgatgacncccacccctcatcattcaggaacagttaactaccaaatgaagcacactggagattgaccagtttgcaaattcactacttcacagctccaaactaaatgcaaaaccattctactaagta

SEQ ID NO: 418 - DNA, 530 bp, Homo sapiens
gatgtaaaagctcaaaaattgtgattccttgaacgttcactaaatcttcaagcaaaaacacatttttacattatttttacgttgattattttagtgaaagaccatatgaagaagcatttttaatattaacttgttacatactttgatccactttacatcatttttatgttgttgaggtagggaaattagggttcagtttatcactggacattcaggaggcaagtcaatcctttttatttccttataaaattaactcttcaaaagccgttaaacagagagttatcttaatttttattgcagtaggaggaaatatatttaaaatatttgtagatttatagcaaatagagactcgttatttaaaggttaaataacaatttgttcttttgttgtttttgccagtttagggcagtagctgcttttgtcataaatatcttcctaccacatcaaaaatgctgcttttaaaatttttgtttataaattgagaaggaattttctctctataagtttctgtcattgaacagatcaccatt

SEQ ID NO: 419 - DNA, 262 bp, Homo sapiens
actttctggtcttcatttaggaattataaattcatgacaaaagaacaaattttttatggaataaataacttccaggaacaacagtttataagtattcagttgtttaaataaacaaaactattttccttcctaaaatgtaaacatccagtaaatgaaacatacatgatattccaggtatagaaatcttagtaactcacttatgaaagaggtgcattttggtatgtttggtggtaaggtttttgtttatcttatgtataaaagt

SEQ ID NO: 420 - DNA, 410 bp, Homo sapiens
  misc_feature 14, 17: n = A,T,C or G
actgaaattagtanaanctaggccaatgatccatgaattgttaactgaagggcggagatcgaagactaacaaagcaaaaacccttgctacatgggcaacaaaagaactgaggaaactgaagaaccaagcttgatctgttaccattgggatgataacctgaggacccccactggaaatctcccatcttttgaaaaacctggaagtgaggagtgtgcacggatgctgaatgtttgggaatgagaggatgagtgagtgaggcttgaaaacacaccacattgaaaatcctgccacagcagcagccgcagccgccaacagcagcgctgttagtgagctaagtaagcactgacttcgtagaaaaccataacatcggccatcttggaaaagagaaaaacaatggagttacttatttt

SEQ ID NO: 421 - DNA, 235 bp, Homo sapiens
gttgtgctggttatttccagaaagaagggaatggcaaagtatgagaaggctgagataaaggagatgggtgagatgcatagggaactcaatgcataactatataatttgaagattatagaagaagggaaatagcaaatggacacaaattacaaatgtgtgtgcgtgggacgaagacatctttgaaggtcatgagtttgttagtttaacatcatatatttgtaatagtgaaacctgt

SEQ ID NO: 422 - DNA, 502 bp, Homo sapiens
acctgtgggtttattacctatgggtttatatcctcaaatacgacattctagtcaaagtcttggtaatataaccaatgttttcaaatgtattctgtcatacaaagagcagatttttattgaacttgtgcaataactatattaccatacaatataaatattcatgaatagtttcccaagtctggagcgaccacatagggagaaaatgtaaatgtctcaatttttgttcacaaaagtatattttatcaaattgctgtaagctgtggatagcttaaaagaaaaaaagtttcctgaaatctgagaaacaagacatttaaagaatcagcaaaatttcaaataaaaaattatgaaaatattatcctcattagttcatttagtcccatgaaattaattattttctctgcttgatcttggtggacagtttcatgaagctgtcagttagttcattaaagttttggaaattctcaggacagtgcagtggtatcagaaacttgtattcaagagt

SEQ ID NO: 423 - DNA, 508 bp, Homo sapiens
acctgtgggtttattacctatgggtttatatcctcaaatacgacattctagtcaaagtcttggtaatataaccaatgttttcaaatgtattctgtcatacaaagagcagatttttattgaacttgtgcaataactatattaccatacaatataaatattcatgaatagtttcccaagtctggagcgaccacatagggagaaaatgtaaatgtctcaatttttgttcacaaaagtatattttatcaaattgctgtaagctgtggatagcttaaaagaaaaaaagtttcctgaaatctgggaaacaagacatttaaagaatcagcaaaatttcaaataaaaaattatgaaaatattatcctcattagttcatttagtcccatgaaattaattattttctctgcttgatcttggtggacagtttcatgaagctgtcagttagttcattaaagtttttggaaatttctcagacagtgcagtggtatcagaaacttgtattcaagagtacctg

SEQ ID NO: 424 - DNA, 444 bp, Homo sapiens
actgcagggctgagtcgctgcggaagatgctgaatgactccaccagggatgaggggacgagactccccgtagggaggatctccactctcagggacacgctggtgaagagttgggttggagggttatagagagtgaagtgcacagacacagccctggtgctgcggtcaatccacatgctggccctgagtcgggacagggctgtgtgggcttcagtccttgttctgcccaggctgagcacacagtcctcccttgtcccacagcccccaggaccattcagggtcacgttttggttctctgggtctatcaggtaggggttctcagggcctccaacttcgggactacatgtaggaatagagtcttcgatgagtgctgaaaatggcctgggaggcttgcataaatgcctaggaaaaacttttagctgcctaattacggaactgcctatta

SEQ ID NO: 425 - DNA, 617 bp, Homo sapiens
  misc_feature 492, 495, 556, 559, 564, 597, 598: n = A,T,C or G
acttggttttacagctcctttgaaaactctgtgtttggaatatctctaaaaacatagaaaacactacagtggtttagaaattactaattttacttctaagtcattcataaaccttgtctatgaaatgacttcttaaatatttagttgatagactgctacaggtaatagggacttagcaagctcttttatatgctaaaggagcatctatcagattaagttagaacatttgctgtcagccacatattgagatgacactaggtgcaatagcagggatagattttgttggtgagtagtctcatgccttgagatctgtggtggtcttcaaaatggtggccagccagatcaaggatgtagtatctcatagttcccaggtgatatttttcttattagaaaaatattataactcatttgtttgtttgacacttatagattgaaatttcctaatttattctaaattttaagtggttctttggttccagtgctttatgttgntgntgtttttggatggtgttacatattatatgttctagaaacatgtaatcctaaatttaccctnttngaatntaatccctgaatgatattttttatcataaatgnngaataatcaaatacatttt

SEQ ID NO: 426 - DNA, 353 bp, Homo sapiens
  misc_feature 18, 19: n = A,T,C or G
acgctcaaattcataacnngccaaagctggtgataaaaggtaggagagctggtcttcccaaacagtagtgaggccaagatccttcctgtgttctgacaccaggagcctcagctgcatttcaatttcattacttgttactgacgcgtcaattgtggatgcacacagaggtggaaagggaggaagggatgttgtagctccaggagcacacacagatttaattgcttcctcactcatgggtttccatttggattcatcgttcaaatcaaatacacaggtttctactgcatcagagggttgacaatttcccaggaacatctgatggttgaaaacacaaccaattgttcgatatgggt

SEQ ID NO: 427 - DNA, 579 bp, Homo sapiens
acaacatgacttaaaacttttttttttctattaaaacttaaaggggaacaaaacttgaaaaagccctgttcttcagaaggtgagtgggttgagggaggcagtaatatgaagtgactgctgtgtattttaactaccagattttttatatttgccactgttaaatagttggaaaggggaaattctgattaagcgaaagtggtatcatcctaggtaagcttatttcagaacaagtctaatatttcagattctttcttttcgactttatactctgagttattacttactgtaagtggtgtatatgaaacctccatgcattttccagtatggatctgctaatatgcacagtaaatccatgtctttgtttgtttttctattaaaaagcaatcaagaaagataatgtgaaaaagaaaggaatttagaggtagggaaaagatgaatgtcagacatttgaagaactatagtaaaatgataaacactaaatatacttgagaaaactttcttaatatgccaatgaggtaggcctgatctttgaaatagtgaataggaatacaatgcatttcctcagtgatcactgattag

SEQ ID NO: 428 - DNA, 385 bp, Homo sapiens
  misc_feature 13, 14, 15, 345, 363: n = A,T,C or G
acagtggcatgannncagcttactgcagccttgggttccctaggcttatgtgatcctcctacctcagcctcctctttactgggaccacaggtgtgtgccaatacacctgactaattttaatttttatagaggagaagtattgccatgtttcccagtttaaacttgaactccctaggttcaagtgatctacctgccccaaactcccaaagtgctgggactacaggcatgagccactgcacctggcctcaggtattatttctatttctattttctacttccataatttctattatatttttcatcttttacttgatattctatttttttctgattttatttagttanctgtgttcccatttaggntaaatttttaaaattaatgtgt

SEQ ID NO: 429 - DNA, 276 bp, Homo sapiens
acttgaaactgcatcataaatgcaacattgtcatatgtgaaaacgacaccctaagtccttctttttaaaaatgacattgcgtttagcttattgtaagaggttgaacttttgtattttgtaactatctttaagctcttcagtttataattcatataaaatgccttttgtatttaaaataatcctattttaatcagtgcatgaaatttgcttttttaaagttcatttgaatgattattccttccctctaaagaaatgattttggtaatgttgagaggt

SEQ ID NO: 430 - DNA, 225 bp, Homo sapiens
acaataaaaatggatcccaacactggacggtcaagagggtttgggtttatcctgttcaaagatgcagccagtgtggagaaggtcctagaccagaaggagcacaggctggatggccgtgtcattgaccctaaaaaggccatggctatgaagaaggacccggtgaagaaaatcttcgttgggggtctgaatcctgaagccactgaggaaaagatcagggagtacctg

SEQ ID NO: 431 - DNA, 483 bp, Homo sapiens
  misc_feature 15: n = A,T,C or G
acctgtgggtttatnacctatgggtttatatcctcaaatacgacattctagtcaaagtcttggtaatataaccaatgttttcaaatgtattctgtcatacaaagagcagatttttattgaacttgtgcaataactatattaccatacaatataaatattcatgaatagtttcccaagtctggagcgaccacatagggagaaaatgtaaatgtctcaatttttgttcacaaaagtatattttatcaaattgctgtaagctgtggatagcttaaaagaaaaaaagtttcctgaaatctgggaaacaagacatttaaagaatcagcaaaatttcaaataaaaaattatgaaaatattatcctcattagttcatttagtcccatgaaattaattattttctctgcttgatcttggtggacagtttcatgaagctgtcagttagttcattaaagttttggaaattctcagacagtgcaggtggtatca

SEQ ID NO: 432 - DNA, 325 bp, Homo sapiens
  misc_feature 15, 16: n = A,T,C or G
acaagccaggtaatnncgaggcctccaggattgctttgttgttaatgttgctttggctaaatgggctgttttattcttccatatgacttttagaatggttttctttttctaattccataaaaagttgcatttatagtttgagagaaatagcacttaatctgtaagttgctttaggcagcacggacattttaattatattgattctttaaattcatgagcatggagtgcctttttacttatttgcgttgtctctattttttttcagcagttttgtagttcttgttgtagagatattttacctccttgatttaatgtattactaggt

SEQ ID NO: 433 - DNA, 512 bp, Homo sapiens
  misc_feature 20, 21: n = A,T,C or G
caggtacctgtgggtttatnncctatgggtttatatcctcaaatacgacattctagtcaaagtcttggtaatataaccaatgtttccaaatgtattctgtcatacaaagagcagatttttattgaacttgtgcaataactatattaccatacaatataaatattcatgaatagtttcccaagtctggagcgaccacatagggagaaaatgtaaatgtctcaatttttgttcacaaaagtatattttatcaaattgctgtaagctgtggatagcttaaaagaaaaaaagtttcctgaaatctgggaaacaagacatttaaagaatcagcaaaatttcaaataaaaaattatgaaaatattatcctcattagttcatttagtcccatgaaattaattattttctctgcttgatcttggtggacagtttcatgaagctgtcagtttagttcattaaagttttggaaattctcagacagtgcagtggtatcagaaacttgtattcaagagtacctc

SEQ ID NO: 434 - DNA, 467 bp, Homo sapiens
acattggaagcttttgtttataggaacttgtagggctcattttggtttcattgaaacagtatctaattataaattagctgtagatatcaggtgcttctgatgaagtgaaaatgtatatctgactagtgggaaacttcatgggtttcctcatctgtcatgtcgatgattatatatggatacatttacaaaaataaaaagcgggaattttcccttcgcttgaatattatccctgtatattgcatgaatgagagatttcccatatttccatcagagtaataaatatacttgctttaattcttaagcataagtaaacatgatataaaaatatatgctgaattacttgtgaagaatgcatttaaagctattttaaatgtgtttttatttgtaagacattacttattaagaaattggttattatgcttactgttctaatctggtggtaaaggtattcttaagaatttgcatgt

SEQ ID NO: 435 - DNA, 379 bp, Homo sapiens
acgaggtggctcgactgctcaacctcaccgagaggcaggtcaagatctggttccagaaccgcaggatgaaaatgaagaaaatcaacaaagaccgagcaaaagacgagtgatgccatttgggcttatttagaaaaaagggtaagctagagagaaaaagaaagaactgtccgtcccccttccgccttctcccttttctcacccccaccccagcctccaccatccccgcacaaagcggctctaaacctcaggccacatcttttccaaggcaaaccctgttcaggctggctcgtaggcctgccgctttgatggaggaggtattgtaagctttccattttctataagaaaaaggaaaagtttgaggggggggcattagtgctga

SEQ ID NO: 436 - DNA, 338 bp, Homo sapiens
ctgataacggacagaaagagaatgcccacaagtgggtcttctgtggaagatgcatggaggaagaaaggagaaaacagagatcctatcagatgaccttacagacaaagcagaggatcatgaattttctaaaactgaggaactaaaactagaagatgtggatgaggaaattaatgctgaaaatgtggaaagcaagaagaaaactgtgggagatgatgaaagtgttcctacaggttatcacagtaaaacagaaggagcagaaagaaccaatgatgatagctcagctgaaactattgaaaagaaagaaaaagccaacctagaggaacgggccatttgtgagt

SEQ ID NO: 437 - DNA, 529 bp, Homo sapiens
actccaacattaccggatctggattggggaggttggtcagggaagagaggggttctacccacagatcaactgtgtaatcttttactattcaagctataattcagcttcaaagtagagtagaaaaaaaattgtcttaactgttctagttcttgatggttttcctccttattaacagttggtatttcttccttggcccttttggactaatgttactgtccaagttctttctcaagaaaccacatctggttcaggagagtgtcaagttggactctttgaactctgttgctgtctgagcaatcgtggtgcctagactttgcattccttgttctgttgacctgcatacatgtgagagctatttctttaagaactatataggctgtgaaaacgcactttctttcccccaaagagctgggaatttatgaagttatggcaatgaactgcagcatgctgggacaattatttgactacttttttttgtaatattgtcaaatgtctctatggattctgacagagatttctttttgttttg

SEQ ID NO: 438 - DNA, 374 bp, Homo sapiens
  misc_feature 10, 144, 165, 166, 172, 176, 180, 191, 192: n = A,T,C or G
ccgggcaggncttggctcctgtggaggcctgctgggaacgggacttctaaaaggaactatgtctggaaggctgtggtccaaggccatttttgctggctataagcggggtctccggaaccaaagggggcacacagctcttcttanaattgaaggtgtttacgcccnntatganacanaatnctatttgggcnngagatgcgcttatgtatataaagcaaagaacaacacagtcactcctggcggcaaaccaaacaaaaccagagtcatctggggaaaagtaactcgggcccatggaaacagtggcatggttcgtgccaaattccgaagcaatcttcctgctaaggccattggacacagaatccgagtgatgctgt

SEQ ID NO: 439 - DNA, 195 bp, Homo sapiens
accattggtggccaattgatttgatggtaagggagggatcgttgacctcgtctgttatgtaaaggatgcgtagggatgggagggcgatgaggactagaatgatggcgggcaggatagttcagacggtttctatttcctgagcgtctgagatgttagtattagttagttttgttgtgagtgttaggaaaagggcgt

SEQ ID NO: 440 - DNA, 84 bp, Homo sapiens
  misc_feature 16, 22, 32, 38, 53: n = A,T,C or G
acggaggcctccaganacccancgaagatganaagaanaagctggcagagaanaaggcttccatcggttatacctacgaggaca

SEQ ID NO: 441 - DNA, 211 bp, Homo sapiens
  misc_feature 15: n = A,T,C or G
acacacagacaaggnatggtgatttagttgatcacagcggttcttaaaaatcggacacaaatattggctaaaaataatcccaaacgtttatatatggctttgaaaataattttatctggcttgcggcatgctttcacatgttatctcttaggattttcacaaagccctgtgtggtaggtataatgcccatcttagagatgaaaaaatgggt

SEQ ID NO: 442 - DNA, 468 bp, Homo sapiens
ggaatgctcctaaatgatcgcaaagtatttgttggacgatttaagtctcgtaaagaacgagaagctgaacttggagctagggcaaaagaattcaccaatgtttacatcaagaattttggagaagacatggatgatgagcgccttaaggatctctttggcaagtttgggcctgccttaagtgtgaaagtaatgactgatgaaagtggaaaatccaaaggatttggatttgtaagctttgaaaggcatgaagatgcacagaaagctgtggatgagatgaacggaaaggagctcaatggaaaacaaatttatgttggtcgagctcagaaaaaggtggaacggcagacggaacttaagcgcaaatttgaacagatgaaacaagataggatcaccagataccagggtgttaatctttatgtgaaaaatcttgatgatggtattgatgatgaacgtctccggaaagagttttct

SEQ ID NO: 443 - DNA, 502 bp, Homo sapiens
  misc_feature 16, 20, 21, 469: n = A,T,C or G
acctatatctgagacncccnnggacttaattctcagattttgtattgattctgaaaacagaattggaaatagtggagtagaagaaataaaaggtcatcccttttttgaaggtgtcgactgggagcacataagggaaaggccagcagcaatccctatagaaatcaaaagcattgatgatacttcaaattttgatgacttccctgaatctgatattttacaaccagtgccaaataccacagaaccggactacaaatccaaagactgggtttttctcaattatacctataaaaggtttgaagggttgactcaacgtggctctatccccacctacatgaaagctgggaagttatgaatgaagataacattcacccataaccaagagaactcaggtagctgcatcaccaggcttgcttggtgtagataacaatacactgaaatactcctgaagatggtggtgctttattgactncaagaggaaattctacaggattaggatttctaa

SEQ ID NO: 444 - DNA, 473 bp, Homo sapiens
acacaaaagggcatagtcctacaaagttgtttatataattgttttatgtgtgcaaattgaaatattaaagatggatcagggatctcagtttaaggaatcctgccttctgtatgatgatgtcttaatttttgagattttcatatattgggttatagctatatatcaggacaggtaaatacattataaaattataacctttataataatttttagtataatcacttgtgtgactataataaattggctttagttttctttactcttcacagttttaataggtaactattttacaagaataacattgctaggtagaaaaatttctgttcagttaggagttcttattttgctgctgaaatgagtcatgcacaattttaaatctctgtagtttcttcataagctattttactatcttactattttataagccttgtgttgcagtcaagtttttaccacattctatagaccttgtctgt

SEQ ID NO: 445 - DNA, 400 bp, Homo sapiens
  misc_feature 84, 226, 304, 318, 319, 345, 368, 369: n = A,T,C or G
tcgtttctttttgagatggagtcttgctctgttgccagactggagtgcagtggtgcgatctgggctcactgcaatctccacctnccgggttcaagcgattctcctgcctcagcctcccgagtaactgggactacaggtgtgcgccaccaagcccagctcatttttgtatttttagtagagatggggtttcacgatgttggctaggatggtctcgatctctggtcanagtcttttctgtaaatatccttggtaaagaagcaatttttagactgtagctgttgcaaatgctttaaggaagaagcanaacaactgtcaagnnttcctgaaatgaagaaactacaccanggctgctatatcagagcaaaccnnaaaccaagcactccaatcatgatgccgacag

SEQ ID NO: 446 - DNA, 530 bp, Homo sapiens
actttcatattttaaacagaggatatcggcatttgtttctttctctgaggacaagagaaaaaagccaggttccacagaggacacagagaaggtttgggtgtcctcctggggttctttttgccaactttccccacgttaaaggtgaacattggttctttcatttgctttggaagttttaatctctaacagtggacaaagttaccagtgccttaaactctgttacactttttggaagtgaaaactttgtagtatgataggttattttgatgtaaagatgttctggataccattatatgttccccctgtttcagaggctcagattgtaatatgtaaatggtatgtcattcgctactatgatttaatttgaaatatggtcttttggttatgaatactttgcagcacagctgagaggctgtctgttgtattcattgtggtcatagcacctaacaacattgtagcctcaatcgagtgagacagactagaagttcctagtgatggcttatgatagcaaatgacctcatgtcaaatat

SEQ ID NO: 447 - DNA, 346 bp, Homo sapiens
actacagaagagagcgccggttcttgccctgagtctgcttctggcagttgggtccctcatcgggtatagtcgttctccaaatgataagtccatcaatgcccttctgatgactgttacaggattttttattggtggaccttctaatatgattagttctgctatttctgcggacttgggtcgccaggagctcatccaaaggagcagtgaagctttggccactgtcacaggaattgtggatggttcggggagcattggagctgcagtgggccagtatttagtgtctctgatccgggacaagctaggatggatgtgggttttctactttttcattctcatgacaagttgt

SEQ ID NO: 448 - DNA, 581 bp, Homo sapiens
  misc_feature 211, 539: n = A,T,C or G
actggatcttttattcttctacctttttcttcagcagtgtccgtatagattaatctcctgacatttccagaactcatcagcagcttttttgggggagcattttcaaatattccaacattctcaaactctatataatcttcagtgacagctgggttacctggtcctgcctccctgacctgcagacatccttcggctggcctctagggctcgngaaggcaaagctgagttagccagccttgcaacctcaattctcagagaagacccctgttcactccaggctgtgaaacactcacatttaccacacactacatgtcagcagtcggcaggtagcctcataggacctttaattgcagaatatgtaaaataagagtcttggacttaaaatgattctttaccaatctgtgatatgaggaaagcacaataccagtaaaatatattttcaaacaggaaactttatcctttgacaatttattaaagggaagagaagtggtaaaattttatctcaatactgtttatatcatgacatactaattgtttgngcctgatttcaagttttaaatgctatctctctgactcattct

SEQ ID NO: 449 - DNA, 427 bp, Homo sapiens
acaactcttaactgtgccagtccccagttcaccagctttgtatccagtcgtcatctcattcaagtatggctttacttggtgacactggccatagctaagttaacttggcatgtttgacttttgacaataacaaaaatggttttggattttgttttatttccaaaaaatgtatacaatatcagaacttcacattttatatactagtatctggctattagtattttacaggaaccatagttcttggtgactacatatatatatatatttttgtgaccttttttgtaaactaagtgccgtttcaacgttacaatcatttttagggttattgtaatcaatgtgaatatcatgttttttcaaatctgttctgagcctatagtgtttgctttgtgaacatgtgtattgtatatattctgtatagttatattgt

SEQ ID NO: 450 - DNA, 506 bp, Homo sapiens
  misc_feature 494: n = A,T,C or G
gagttggcactctacgacttctagatgcagttaagacttgtggccttatcaactctgtgaagttctaccaagcctcaacaagtgaactttatgggaaagtgcaggaaataccccagaaggagaccacccctttctatccccggtcaccctatggggcagcaaaactctatgcctattggattgtggtgaacttccgtgaggcgtataatctctttgcagtgaacggcattctcttcaatcatgagagtcccagaagaggagctaatttcgttactcgaaaaattagccggtcagtagctaagatttaccttggacaactggaatgtttcagtttgggaaatctggatgccaaacgagattggggccatgccaaggactatgtggaggctatgtggttgatgttgcagaatgatgagccggaggacttcgttataagctactggggaggtccatagtgtccgggaatttgtcgagaaaatcattcttgcacattnggaaaaaccatt

SEQ ID NO: 451 - DNA, 322 bp, Homo sapiens
acgatgtctagtgatgagtttgctaatacaatgccagtcaggccacctacggtgaaaagaaagatgaatcctagggctcagagcactgcagcagatcatttcatattgcttccgtggagtgtggcgagtcagctaaatactttgacgccggtggggatagcgatgattatggtagcggaggtgaaatatgctcgtgtgtctacgtctattcctactgtaaatatatggtgtgctcacacgataaaccctaggaagccaattgatatcatagctcagaccatacctatgtatccaaatggttctttttttccggagtagtaag

SEQ ID NO: 452 - DNA, 273 bp, Homo sapiens
actgttgctttaatatgagcttcaatataagaagcaatctttgaaataaaaaaagatttttttttaattctgggtttgattcttaacattgaaacaaacgttaagtatttctaatgatccatttatatttctaatttaattgtgatcttttaataaccctatttatgatctgttgttgtctgtctgctgcttttattgtttatttaaaatcaaatatgttttacaaatgttttttcagacaagattctgtaacatcatgtaaagcttttttgt

SEQ ID NO: 453 - DNA, 163 bp, Homo sapiens
  misc_feature 10, 56, 87: n = A,T,C or G
gaaacatcantttctgactgaagtggagactacaacaactttagtgtttcccttanaaggattacggccatggtgaacttgactgantaaacaatgctataaataaaaagctcttccaaaacattaaccatggtaagcatcattatccccataaaatggtggc

SEQ ID NO: 454 - DNA, 339 bp, Homo sapiens
  misc_feature 15, 16: n = A,T,C or G
actctggggcttgtnngagggtaaaatagagacccagtaaaattgtaataagcagtgcttgaattatttggtttcggttgttttctattagactatggtggtggtgctagaagaatttgagaagaaatactcctgtattgagttgtatcgtgtggtgtattttttaaaaaatttgatttagcattcatattttccatcttattcccaattaaaagtatgcagattatttgcccaaatcttcttcagattcagcatttgttctttgccagtctcattttcatcttcttccatggttccacagaagctttgtttcttgggcaagcagaaaaattaaattgt

SEQ ID NO: 455 - DNA, 206 bp, Homo sapiens
  misc_feature 135, 136, 139: n = A,T,C or G
acaacaaaataggatgttaatccattaccactgttcttccattcgagaggcagctgatggttaaagcgcccgtaacatacatcgattatttttatcccatgactttattgtatgtttagaaaggtggaacagcannaanaaaaagaggctggacaaaagacgttgatgtttttgttcttcagatgtatgcagagctgattatgagt

SEQ ID NO: 456 - DNA, 488 bp, Homo sapiens
  misc_feature 9: n = A,T,C or G
accactgcnaggccactgtttatacatgaaagcatccatgatgaggttgtaaacagacttaaaaaggcctatgcgcagatccgagttgggaacccatgggaccctaatgttctctatgggccactccacaccaagcaggcagtgagcatgtttcttggagcagtggaagaagcaaagaaagaaggtggcacagtggtctatgggggcaaggttatggatcgccctggaaattatgtagaaccgacaattgtgacaggtcttggccacgatgcgtccattgcacacacagagacttttgctccgattctctatgtctttaaattcaagaatgaagaagaggtctttgcatggaataatgaagtaaaacagggactttcaagtagcatctttaccaaagatctgggcagaatctttcgctggcttggacctaaaggatcagactgtggcattgttaaatgtcaacattccaacaagtggggctgagattg

SEQ ID NO: 457 - DNA, 453 bp, Homo sapiens
  misc_feature 10, 11, 13, 255, 256, 272, 299, 334, 342, 345, 347: n = A,T,C or G
acatttgatnncnttggacattctatcaatgattattcaatatctcctgatgggcagtttattctcttagaatacaactacgtgaagcaatggaggcattcctacacagcttcatatgacatttatgatttaaataaaaggcagctgattacagaagagaggattccaaacaacacacagtgggtcacatggtcaccagtgggtcataaattggcatatgtttggaacaatgacatttatgttaaaattgaaccnnatttaccaagttacanaatcacatggacggggaaagaagatanaatatataatggaataactgactgggtttatgaanaggaagtnttnantgcctactctgctctgtggtgggtctcccaaacggcacttttttagcatatgcccaattttaacgacaacagaaagtcccacttattgaatactcccttctactct

SEQ ID NO: 458 - DNA, 376 bp, Homo sapiens
acacttatcatctaaatacctctctcccgtcttctcttttacaacataccatttcaacctgtttgtttaaagaatgaaggccttaaggaaaagccttattcacatccccgtaaaagaaagaaataaatatttgtttctagaatcaatctaactgaacttgactaaatcttgatagaggctccaatcttactcacacataaggcgatggatgatcttttgttgtcaacaaattctcattaagatagctaaacagttaattataattattcaaatgtatttcttgagttcctactatgtgcaaagtatcgttccaaagtagacactcttccttagaaataaagtgggccactgaaatcataacttcaaaagtctagaa

SEQ ID NO: 459 - DNA, 297 bp, Homo sapiens
acaaattctttataactgacttagtcatttgccgcttagcagtttatatactgaaatgaaaacatcttgtggggaaaagtgactttagattatgaactcaattcaaatgaactctatttaaaatggggtcctattttggacaaaggaaattaagaatgtaaaagtcagaacagtcttgaggtaaaaagtgtgctttggcttaaaagggatacagtatattaattacatcttttattattattgtttatttcttagaatcatttctggctttctcaaaacaaaataatattaatgagt

SEQ ID NO: 460 - DNA, 454 bp, Homo sapiens
actggtcctactattatagaatgtttgcttcataagaacaggcactgactgtatcatctctgaacacaatggaatgaagctggcaataacaaaagaaaaattggaacatttacaaatgtgtggaaattaacagatttctaaacaatcaaggggtcaaagaagaaatcacaagggaaattagaaaatactttgagatgaatgaaaacaaaaacacaaaataccaaaactgagagtgtgtgatgacaacagtgtgcagagggaaattcatagctgcaaatgtccatattaagaaacaagacagtaactatgtgaggtgatgggtgttaattagctcagctgtagcaatcatttcataatgtatatcaaaacatcccactgtatactttatacttttttataaaaataaatattcttacaaaaggacaggcgctgtgtctgtctggctcaccattgt

SEQ ID NO: 461 - DNA, 300 bp, Homo sapiens
  misc_feature 15, 236: n = A,T,C or G
accttcactatatcncactttattgttaattaactgcatttttaaaagtagagattggtcttctcttatgtatacttatatccctctaaatttaaatccatcttgccatgttttgtatttaacttgaagtgatctaattaatgagaaaaagaggtattttaaaattaaggtgcatccaaaagggaagcgtaaggatacagagagatctggaaaccttgccttgagagacgtaatcnaaagaacctaggacacgtgccctgaaaatgagacaaggaagacatgtgagaaccatctgcatgt

SEQ ID NO: 462 - DNA, 472 bp, Homo sapiens
acaaatctggggtttggccattaaaagttatttacaacagtgggagaaaaaaagacaagaagttgtttcacattacagacctccccccaccccaaagcctaatacttgcttaccaagtcaaaaaagagacacagttgattcacaggctggaggtttgaacttgagtaagacatttataaaaacctagacggggcagtgtcctccccagcccaggtgccactgggcacagcacaagagactaaaaacaacaggggaaggctggacactcaaggtttgggagtataagcaccccacttctggctcagggatttggggagtagggtaaacaaaacctacttggaaaagaattggggaagaaaaccaacaactgccttatgcaggggtggggacagggaaggaggtagggccagggacaggagcatttcacatcactaacctaacttgggaagctgtaagggaccatcttcaactg

SEQ ID NO: 463 - DNA, 569 bp, Homo sapiens
  misc_feature 30, 59, 61, 62, 484, 496, 504, 541: n = A,T,C or G
ttgcatgttcatgtttaagcagttactgtnacaagaagtttaaagttaattatatcagntnnctaatgcttcatgataggcaactttacccattttgaatgccttaatttaatttttttcaaagtctcagccctgtctgtattaaaaaacaaaaaaagcgtttaccagctcttaggatgtaaactagctttgtggaagataaatcgtgcactatttttacacataaatagttatatcaatgtcagcctattttgattaacaaatgtttttaaagtattattggttatagaaacaataatggatggtgttggaactaatatatccttgatgtctgtctattattcattcaactctttttacagacctcagtattagtctgtgactacaaaatattttatttgctttaaatttgctggctaccctagatgtgtttttattcctggtaaagacatttgtgattacattttcacacttaagattcaanaatttttcccanatataaanaaaactaagacaggctgtagatgcattttaaatattnaaatatgatcctcagacatgcagctgtg

SEQ ID NO: 464 - DNA, 247 bp, Homo sapiens
  misc_feature 8, 10, 11: n = A,T,C or G
acttagantnntataaaccacttcccagagcaggaaaattaaaatgtgaagcagttgttgctgatgtcctagataaaggatccggtgtagtgattattatggatgtctattcttattctgagaaggaacttatatgccacaatcagttctctctctttcttgttggctctggaggctttggtggaaaacggacatcagacaaagtcaaggtagctgtagccatacctaatagacctcctgatgctgt

SEQ ID NO: 465 - DNA, 281 bp, Homo sapiens
acccaaatttccaagacacaaacatgacctatccaagcgcattacccacttgtggccaatcagtggccaggccaaccttggctaaatggagcagcgaaatcaacgagaaactggactttttaaaccctcttcagagcaagcgtggaggatgatggagaatcgtgtgatcagtgtgctaaatctctctgcctgtttggactttgtaattatttttttagtagtaattaaagaaaaaagtcctctgtgaggaatattctctattttaaatatttttagtatgt

SEQ ID NO: 466 - DNA, 566 bp, Homo sapiens
actcatttatttagcctctcagtgcttaataagacttttctttattttttagttagccgttaggttttgtgaggttagattcctggaagcagtgaatttatacactgttatattaatagagctccgttctttgagtcatgattccaagctaaaggaaattaaaaatgtaatttaataatttcctatttttagggttgttaatttttttctacaaaaaaaccttgaaattttagatatcccaatgtgaatctaatttccatatatacagaaattagacaaataataagtctttagttcaacttaagcatatctcaaatgacttctctaaatttaaagttgatcatgataggatcataaaagacagaaaagacttaagtaatcttgtaatgacaattatttccatttttgctgaactaaaaatatttaacttcataaaatatgttactacagcttccagatttaaagaaaaaaagtttcccccactctcaattaaaagttagaaccctccacttttaaaattatacaaatatttcttttttacattacacagaagccttctgtacctg

SEQ ID NO: 467 - DNA, 543 bp, Homo sapiens
acggtagaactgctattattcatcctatgtgggtaattgaggagtatgctaagattttgcgtagctgggtttggtttaatccacctcaactgcctgctatgatggataagattgagagagtgaggagaaggcttacgtttagtgagggagagatttggtatatgattgagatgggggctagtttttgtcatgtgagaagaagcaggccggatgtcagaggggtgccttgggtaacctctgggactcagaagtgaaagggggctattcctagttttattgctatagccattatgattattaatgatgagtattgattggtagtattggttatggttcattgtccggagagtatattgttgaagaggatagctattagaaggattatggatgcggttgcttgcgtgaggaaatacttgatggcagcttctgtggaacgagggtttattttttggttagaactggaataaaggctagcatgtttatttctaggcctactcaggtaaaaaatcagtgcgagcttagcgctgtgatgagtgtgcctgc

SEQ ID NO: 468 - DNA, 195 bp, Homo sapiens; identical to SEQ ID NO: 8

SEQ ID NO: 469 - DNA, 362 bp, Homo sapiens
gtttgacagtctcattttatcactgcgtttgtatctattactaaaatgtattttttgacctcttactgattcattgttggtatgtaccagctgtagccaaaaagatgctggggcagattgtggacaagtagaagcacctccttcccctctgcgacattgaacggcgtggattcaatagtgagcttggcagtggtgggcgggttccagaaggttagaagtgaggctgtgagcaggagcctctgccaggggatgcaccatctgtggggaggggccgagggagactccatggtctctgctgtctgctctgtcctcctctgtggagaagagcttgagttccaggaacgttttgtcaaggctgctgt

SEQ ID NO: 470 - DNA, 543 bp, Homo sapiens
actgccgggtaacgctgtggtttccattgagcctgaactgatgggtgagggcgtcgagtctccaacaagaactgagggtgtagagccgacaggtaagactgttgttgccattgcatctgggctgctgtgggatgcttttgattcctcactacggcctgagattgtggagctatcacggaagtgtgttgtttcagttgagcccaggctgctgtggtagcttgtatgtgctagggcagctgtggtgctaggagttgaagattttgtgtgtgttgtgctgccgtggaaagttgctgattcttcactatggcctgaagttgtggagctttcagggaagtgcattgtttgagttgagcccgggctcctgtggtaggctgtagattcttcaacatggcctgaggtcgcggagcgggcaggtgggggtgttgttgcagttgcaactgggctgctgtggactggtgtcgattcctcactatggcccaaggttgtggagctggcagaaaagtgggtttgttggagttgagctcgggctgctgtgataagttg

SEQ ID NO: 471 - DNA, 575 bp, Homo sapiens
  misc_feature 484: n = A,T,C or G
accattatttggttcctggagttatacactaattttcagtatattactgttaaattaccaacacaaggcaatttatttgaaagattccgtttatcctgccattgctttgaaaagcagcaggaaacgaaatcctttgacttgtatcagcttctgcagagcatctttgttttcctttgtcctttgtttcctaccttttgaatcagattccgttttagtcaggaagacttcttgggaccattcttagtaacctgaaatttcttttttaattgcatgaagtggattgatcatgagcaaatgatgtgcttatttctccctcactgttgaatatctttgaacttgctgttttcaatatgggcagcacaaaggtgagagatacatattaatagtagtatgtattactcttatacattagatacctatatttaaatgaaaggcccaatttgtaaacatatacattcatattctctcttgccccaagttttangaacatgttaggatataggagacttaatttataataatgagagcatttttttattttactaaagccatttttatagtcaactatcttttct

SEQ ID NO: 472 - DNA, 416 bp, Homo sapiens
  misc_feature 10: n = A,T,C or G
actgagacanaacattgtgtctacataagcacaagttgtaacatttcacaacttctaaaaggaatgtcaacaattacaacgatcatgcataccatggtcgataatcacattttagaagcattttcaaccatttctaaagaaatgcttataacattgttatatatagaactactttcaataaactgcaaaacattgatcgacttttccagtatgagctacagtgtcaacacaaaagggaggcataaatgtttaatttatgaaatcagaatggaatatttactgtaaagaaaaattaaaaagctttcaaataaaggccattatcgaaccaacgtgaagagcacaactcgaacttttgagttcattcatcttttaaagctgtcctctcaataacttcagttctaagcactgaattcagt

SEQ ID NO: 473 - DNA, 510 bp, Homo sapiens
  misc_feature 489: n = A,T,C or G
actaggtagtgctgggcacacagtagatgtttgataaatacctgttgatcccatataaataaatacagtagactataattgaaaaggcaataattaggattatttaaaaatagaaaagtattcaagctaagtaattagtgataaagatgggcttgtttcctctgagtttatgatttcagtcagaatcttcaattctgtatgcttaaaaatgaactgatacttatgaagttcaatgtatttctaggatactgaactactacaaactgccaactttatattgtttacatcactcatcaatattgaaaagcataatattatgtgacattgtaaattataatccaatggatcccagctgaacagtcacttatttgaaacaatacaggaaaattatcatctattcctattactaaagttgcatatgttaatcataattctcaattttacatatttgtatttggttacaaactagctaaatgctatcagtgctgncttcctaagttgctgtgtctg

SEQ ID NO: 474 - DNA, 501 bp, Homo sapiens; identical to SEQ ID NO: 341

SEQ ID NO: 475 - DNA, 332 bp, Homo sapiens
acagttagtgggagcacactatataaatcctttgcatgacaccattcaacaatattttttaaaatctacaaaattttaaagtttcacttccctagcaaaatatcttcagtcaagaaattagtctttgaaaattatgaaaattgttgtgggaaatatttatacaaattattactgataatgcacatatattttgaaacattgtttctagaagcaataaaatataacctatttaggagataacccaaatgatttgtaaaaaaattaacttgtagaaaagggaaggatgttgtgtaaaatcaagtcaattatttgaggtttttataatattgagt

SEQ ID NO: 476 - DNA, 449 bp, Homo sapiens
acagcctctcttactgggaagaatcatagcttcctatgacccggataacaaggaggaacgctctatcgcgatttatctaggcataggcttatgccttctctttattgtgaggacactgctcctacacccagccatttttggccttcatcacattggaatgcagatgagaatagctatgtttagtttgatttataagaagactttaaagctgtcaagccgtgttctagataaaataagtattggacaacttgttagtctcctttccaacaacctgaacaaatttgatggaggacttgcattggcacatttcgtgtggatcgctcctttgcaagtggcactcctcatggggctaatctgggagttgttacaggcgtctgccttctgtggacttggtttcctgatagtccttgccctttttcaggctgggctagggagaatgatgatgaagt

SEQ ID NO: 477 - DNA, 183 bp, Homo sapiens
  misc_feature 16, 35: n = A,T,C or G
ctggcctaactcgaangacactacccctgcacctnctactaccacatcagcctttgttaaactatctacaacttatcacagcagcccgagctcaactccaacaacccacttttctgccagctccacaaccttgggccatagtgaggaatcgacaccagtccacagcagcccagttgcaactgc

SEQ ID NO: 478 - DNA, 195 bp, Homo sapiens
  misc_feature 72, 73, 122: n = A,T,C or G
accattggtggccaattgatttgatggtaagggagggatcgttgacctcgtctgttatgtaaaggatgcgtnnggatgggagggcgatgaggactaggatgatggcgggcaggatagttcanacggtttctatttcctgagcgtctgagatgttagtattagttagttttgttgtgagtgttaggaaaagggcgt

SEQ ID NO: 479 - DNA, 488 bp, Homo sapiens
  misc_feature 361: n = A,T,C or G
acctgtgggtttattacctatgggtttatatcctcaaatacgacattctagtcaaagtcttggtaatataaccaatgttttcaaatgtattctgtcatacaaagagcagatttttattgaacttgtgcaataactatattaccatacaatataaatattcatgaatagtttcccaagtctggagcgaccacatagggagaaaatgtaaatgtctcaatttttgttcacaaaagtatattttatcaaattgctgtaagctgtggatagcttaaaagaaaaaaagtttcctgaaatctgggaaacaagacatttaaagaatcagcaaaatttcaaataaaaaattatgaaaatattatcctcnttagttcatttagtcccatgaaattaattattttctctgcttgatcttggtggacagtttcatgaagctgtcagttagttcattaaagttttggaaattctcagacagtgcagtggtatcagaaact

SEQ ID NO: 480 - DNA, 231 bp, Homo sapiens
  misc_feature 13, 14, 105, 140, 155, 171, 189, 201, 222: n = A,T,C or G
ttttttttttttnntttttttttttttatactttgtatagtttattatacaaatgattgatagtaaaatagtgaattttaaagcttcttcctaacctttcattgngaatgaacagtgatgcagggagaagagacattcanaagaaaaatcatgtntgtattattaaactanaagtgataaaatgttcanaatgacaatgtntttaaaaaataataaccttgntggaattgt

SEQ ID NO: 481 - DNA, 450 bp, Homo sapiens
  misc_feature 431: n = A,T,C or G
accattcacatcctcaaaaattcccaactcttagaaattatcatatattggcaagttcatatgattcaacctaatagcttctacctcacaggattattgtgagaattaaatgagaaatgcatgaaatgtttggcacacaggctcatagtaagtgctcaataaatggtggatattattattcttaaatgaatcatgtaattattttctatataataatcaaactcaatcccacttatttgcaacttctgtatcaagttttaagtccaatctatttactggaatacaatgatttagcacacattgatttttcccataaacattcatatgcaatgattgctcactaaaatgcgaaaagggtgaggatacaatatgtgtttttattgtttttggatttggcttctttcacttagcatgttttcgaagttcatctntgttatagcatgtatcagt

SEQ ID NO: 482 - DNA, 476 bp, Homo sapiens
acagtatactgaaattccacttaaatactgaaatattctactaaatgacattgttttgtctaaatttcctccagaaaaatctgttagcatttcttaaaagtccctcagatttgagggaaattctaaattaggacagttttctctccaaataaatataaatgatcttgagtatttttgtttaaagaatgacgtgatttttaagcatggtatatagaagtatgggatgaatcttcaatcttccctaaggtttcaataaataataataaatatagtaataatagccaatcagaggggttaaaaaggtatttgggggggctttttttcctagctctatattcacatatactcatataaaccttaccatggggttactttttggttaccatttccccttccccatttttgattaacctgccctaattctcacctttaatatctaacagatacctttatagaattaacaaaacacatacagt

SEQ ID NO: 483 - DNA, 205 bp, Homo sapiens
accattggtggccaattgatttgatggtaagggagggatcgttgacctcgtctgttatgtaaaggatgcgtagggatgggagggcgatgaggactaggatgatggcgggcaggatagttcagacggtttctatttcctgagcgtctgagatgttagtattagttagttttgttgtgagtgttaggaaaagggcgtacctcggccg

SEQ ID NO: 484 - DNA, 195 bp, Homo sapiens; identical to SEQ ID NO: 8

SEQ ID NO: 485 - DNA, 372 bp, Homo sapiens
actagccagtcaattaggatggctctcatgtttccagtgacttcccgacccagtaggtattttggtctgactgcttgctcttcctcaagttgtctcagataagcataaatatctttcacatattcactacaaaggtttggatcagctccatcttctgcatccacatcatttactgcaagaattacatcagagaaagcctgacacaggtcttcttctgcaggggcacatccagatgtttccattgggcttggagaggcagtatcaaccaaaataggctcaggcgaaagtttttcttctttaacaggctcaggttctggctcaggttccggctctggcactggctcagacactggcactggcaccagcataggt

SEQ ID NO: 486 - DNA, 432 bp, Homo sapiens
acatttgggagtttttatgagaaacttaaatgttattatctgggcttatatctggcctctgctttctcctttaattgtaaagtaaaagctataaagcagtatttttcttgacaaatggcatatgttttccacttctttgcatgcgtttaagtcagtttatacacaaaatggattttattttttagtttaactgtgtttctccgacagctcacctctccctgaccagccagccatttccttcctgtgctccacgttcttctgtgtgattaaaataagaatattatttttggaaatatgcaactccttttcagagatcaggagggatttatgtagcagctatttttactgcaaaagtaattcactggaaaaaaaatgtaatttgtaagaaagctttatttttatctcagctctatgtaaagttaaagttactgt

SEQ ID NO: 487 - DNA, 399 bp, Homo sapiens
cttggccgtccattattttctgaagcagatggttcatcatttcctgggctgttaaacaaagcgaggttaaggttagactcttgggaatcagctagttttcaatcttattagggtgcagaaggaaaactaataagaaaacctcttaatatcattttgtgactgtaaacaattatttattagcaaacaattgatcccagaagggcaaattgtttgagtcagtaatgagctgagaaaagacagagcatatctgtgtatttggaaaaataattgtaacgtaattgcagtgcatttagacaggcatctatttggacctgtttctatctctaaatgaatttttggaaacattaatgaggtttacatatttctctgacatttatatagttcttatgtccattttca

SEQ ID NO: 488 - DNA, 505 bp, Homo sapiens
gatggcgattccgggcaggcagtatgggcttattttgccaaagaaaacacagcagttgcaccctgttttgcaaaaaccatcagtgtttgggaatgattctgatgatgatgatgagacctctgtgagtgaaagccttcagagggaagctgctaagaagcaggccatgaaacagaccaaactggaaatccagaaggcccttgcagaagatgctactgtgtatgaatatgacagtatttatgatgaaatgcagaaaaaaaaggaggaaaataatcccaaattgcttttggggaaagacagaaagcccaagtatattcacaacttgctaaaagcagttgagatcagaaaaaaggaacaggaaaaaagaatggaaaagaaaatacagagagaacgagaaatggaaaagggggagtttgatgataaagaagcatttgtgacatctgcatataagaaaaaactgcaagagagagctgaagaagaagaaagagaaaagagggctgctgcactg

SEQ ID NO: 489 - DNA, 297 bp, Homo sapiens
actaattcacaggatctttgtaggttttatctgaaagaaggatataaaaacttaaaagtcagagcagggaaaggggagtaataaattattaagaacaaactcagtgagacttgacttcacttatgatacatgggtagaaagagcaaaccagccttcttcattctgtttctcaatctttgctcttggattaagaggtgtgaatctcccacttcctgaggtggcatttagtggagaacaagaattaccagtagccccggaagatcttcttgtatttatcccgctgacgggagagacagt

SEQ ID NO: 490 - DNA, 323 bp, Homo sapiens
accgttgcccatgcggggattaatgtgcagagctatgtcccctgaggagcccaccttgaagttgatagcaaagctcttgcctgtgggaggcacatagcccttgatgatgatggttcttcgagctgtgagccctccttgcagcctcccgaaatatggcacaggcgggttgaaggttgggggtccttccatggtagggcaaggtggcatcatcgggggtccctggggccggaggggctggcctccgatgaagttgattgattgaagttgcagatccccatccacttgcaggtgggtgaccatctgtaggggaagccggtgcccgt

SEQ ID NO: 491 - DNA, 174 bp, Homo sapiens
  misc_feature 73: n = A,T,C or G
accattggtggccaattgatttgatggtaagggagggatcgttgacctcgtctgttatgtaaaggatgcgtanggatgggagggcgatgaggactaggatgatggcgggcaggatagttcagacggtttctatttcctgagcgtctgagatgttagtattagttagttttgttg

SEQ ID NO: 492 - DNA, 207 bp, Homo sapiens
acatgtcaaatgccttctgtcccagcacagctcccgtggttccattcaccagggcgatgtttaggcctctgcccacattgtttttcacaggactcatgatcatgcggtcttcaaagcacatagtagggcccacgacgttggcggccccactgcagattttaaacgcaaagtagttggctgggcagggcttgatgaggccacacttgt

SEQ ID NO: 493 - DNA, 207 bp, Homo sapiens
acaagtgtggcctcatcaagccctgcccagccaactactttgcgtttaaaatctgcagtggggccgccaacgtcgtgggccctactatgtgctttgaagaccgcatgatcatgagtcctgtgaaaaacaatgtgggcagaggcctaaacatcgccctggtgaatggaaccacgggagctgtgctgggacagaaggcatttgacatgt

SEQ ID NO: 494 - DNA, 507 bp, Homo sapiens
acagcttagagaaaccactcatgaccgggagatgactaaactgaaacaagagctgcaggctgctggatcgaggaaaaaggttgacaaagccacgatggcccagccgcttgttttcagtaaggtggtggaggcagtggtgcagaccagagaccaaatggtcggcagtcacatggacctggtggacacgtgtgttgggacctccgtggaaacaaacagtgtaggcatctcctgccagcctgaatgtaagaataaagtcgtagggcctgagctgcctatgaattggtggattgttaaggagagggtggaaatgcatgaccgatgtgctgggaggtctgtggaaatgtgtgacaagagtgtgagtgtggaagtcagcgtctgcgaaacaggcagcaacacagaggagtctgtgaatgacctcacactcctcaagacaaacttgaatctcaaagaagtgcggtctatcggttgtggagattgttctgttgacgtgaccgtctgctctccaaa

SEQ ID NO: 495 - DNA, 263 bp, Homo sapiens
acatccataataaaagttactattttagtttgctaacaagaatgatttttaacaagggtgatctggtttaaatagctgatttcctatgtttccattattattttaaatatatattgacatttatgtttaaggaaacaacagagctgaaccagtgaagcacatttcatgataagcactaaagagaaaatatgagatcactaaaatccccaaattacttcataagggaaacagtctgagggatattattaaaaatcaatttaagt

SEQ ID NO: 496 - DNA, 444 bp, Homo sapiens
acagctaagtgcgggggtggcggtggagggaacgaaaattgaacctgtctgcctgtgctgtgtcgtgtggctttatcagcccgaggaagggcaggtgtattctaatttgcacaaaggtgctgggtagactagtggcagctctcatgtgctgcacataagtggaatcagtatgaatagaagaacttgctgtataaaggaatttcatggcaacaatgctggtaagggcaattagcctcgcttaagttgccttttttacacaccaaaactttttacatgaagggctggtttcacatgaatactatactgaaatctgtgctctcaagatctagcagtgaccagggctgcccggcgggggctctcctggcaagtcaggaaggtttctgttgctaatataacatagaaacacattagtgcactgggcctctctgaggtcagcatatttgt

SEQ ID NO: 497 - DNA, 169 bp, Homo sapiens
acccacgtaaagacgttaggtcaaggtgtagcccatgaggtggcaagaaatgggctacattttctaccccagaaaactacgatagcccttatgaaacttaagggtcgaaggtggatttagcagtaaactgagagtagagtgcttagttgaacagggccctgaagcgcgt

SEQ ID NO: 498 - DNA, 266 bp, Homo sapiens
acagtttgttttatatctctttactttttttgttactattttatctggccagcgtaatagttttatttagattttttaaaattctgtagattaaagcaaatgacagttattgaactatcacaaaactattaaactgtggtctcggccgttgtcaccatgccggtcgtccggaagattttccgtcgccgccggggcgactcggagtcagaggaagatgagcaggactcagaggaggttcgattaaaactggaagagaccagagaggt

SEQ ID NO: 499 - DNA, 507 bp, Homo sapiens
  misc_feature 479: n = A,T,C or G
actaatatcccttaatggcagaatgtgataatcatggaattaattattgctaaagtagttttcaaataaaaaaagaaaaaagaaaacaaaacaaattaaacttgacacaatctgaccaaacacgtgtcaatttacaatttcaaggttattttacaaaatacctacatttacacaataggctcccggcagcatttccagacaaatgttcttttaatttatcctgacatgctataaatgaataaattacactatttaaaaattatcatcagtaagttttcctttctcatgggtcagagaaaaagaaatgagcgtgcaaagaagattgagaggaagcgcacgcacacagataacttaaagaagcaggaggggctggggagggtcaacaatcactgaacctcacacagtgtgatgctctccaagggtgaaagtcaactgcttatagccatttcaaaagtattttaaagaaaaatgttttgtanggaaaccctttaatgctttcatttttat

SEQ ID NO: 500 - DNA, 252 bp, Homo sapiens
actgccaggggacagtgttgcctctgttgagccttggctgctgtgggaagctgtaggttcctgactgaggcctgaggtggtggtgctgtcagggaatgctgttgtgtgcgttgagcctggtcggctgtgggaggtggtggattcttcactgacgcctgagcttgtcgtgctggcaggtgagagtgttgtgtccggtgatctggggctactgtagaaggtggtagatttctcactcaggcctgctgttgtggt

SEQ ID NO: 501 - DNA, 501 bp, Homo sapiens
  misc_feature 109: n = A,T,C or G
acctgtgggtttattacctatgggtttatatcctcaaatacgacattctagtcaaagtcttggtaatataaccaatgttttcaaatgtattctgttatacaaagagcanatttttattgaacttgtgcaataactatattaccatacaatataaatattcatgaatagtttcccaagtctggagcgaccacatagggagaaaatgtaaatgtctcaatttttgttcacaaaagtatattttatcaaattgctgtaagctgtggatagcttaaaagaaaaaaagtttcctgaaatctgggaaacaagacatttaaagaatcagcaaaatttcaaataaaaaattatgaaaatattatcctcattagttcatttagtcccatgaaattaattattttctctgcttgatcttggtggacagtttcatgaagctgtcagttagttcattaaagttttggaaattctcagacagtgcagtggtatcagaaacttgtattcaagagt

SEQ ID NO: 502 - DNA, 424 bp, Homo sapiens
  misc_feature 15, 16, 380, 397: n = A,T,C or G
accctaccttcagtnntctctttgtaagttggtgacttgcatctgtggccttgaatattttattatcacatgtggcataacagtatccacactttttagttctttattttttttttttattttgagcaattctcctgcctcagcctcccaaatagctgggattacaggtgcatgccaccacacccagctaatttttgtatttttagtagagacaggttttcaccatgttagccaggctggtctcaaactcctgacctcagatgatccgcctgccttggcctcccaaagtgctgggattacaggtgtgggagccaccatgcctgacccacacactttttacttgtataagatgatttttggcttggacataaaagccaaanccacccatttgcttttnatccaaagaacatgtatagttttttgt

SEQ ID NO: 503 - DNA, 591 bp, Homo sapiens
  misc_feature 574: n = A,T,C or G
acagtgttgcccttttcagcaaatgccaattccaagttccattaaatcagaagctccatggctccttggcccacgatgttgagtgctgactgtgtgttctactgaaagagtaaaacactgactatccaaagagaaatggatattttgtttttataataaccatatattattgttttcttcttccctttctatgcaagtgtaaattaatgaacagagaggtatttggaaatggtaatacatttgtcacggatttgtataatgtatacagcattgggaaagtgggtgggggctttctaatatgataccgtctttttaataactatgacaaagcttacataagaattagaagaccactttacatttttacattccttctgctgttcatattaaccttgcacaattacttcattttttctttgactcttttaccacaatgttttggttaatttataatttatcagccatatgtttatcagccatataaccaactagatcccaaatagatccatgtatttgttttccgtgatttggccacattaataaattcataaattgcaatcaaatatcttatatntacacacatatagttta

SEQ ID NO: 504 - DNA, 227 bp, Homo sapiens
acagaatagagcagccaggcccaatgtggaagggtgggcttggtttcctgacaagccaggttagaccaataatggttgaagaggctgccctgggctcagaatgggcagctggtccttgcctgggagaactttgtggaaggaaaaggtaagattccttaagtccaaggagagaaccaatccagggtcaaatttcttttcattccctggatcacaacacaccagggaag

SEQ ID NO: 505 - DNA, 403 bp, Homo sapiens
accgccttatggagtatacgggcaaccatggaatcaacaaggatttggagtagatcaatcaccttctgctgcttggatgggtggatttggtgctcagcctccccaaggacaagctcctccccctgtaatacctcctcctaaccaagccggatatggtatggcaagttaccaaacacagtgagccgggactctaaaaaaaaattgtaattcatgataggcttcgatttcctgtgacactctgaagacatgaaagtagacatcggaaaatgaaaatatttattttaaaaattgaaatgtttggaacctttagcacagatttgctttggtgaaggacacgtgtcttctagttctgcctttttaagtttttgttcatgatggatatgaacatgatttttctttatgt

SEQ ID NO: 506 - DNA, 210 bp, Homo sapiens
actcgtaggttcagtaccattggtggccaattgatttgatggtaagggagggatcgttgacctcgtctgttatgtaaaggatgcgtagggatgggagggcgatgaggactaggatgatggcgggcaggatagttcagacggtttctatttcctgagcgtctgagatgttagtattagttagttttgttgtgagtgttaggaaaagggcgt

SEQ ID NO: 507 - DNA, 187 bp, Homo sapiens
  misc_feature 13, 14, 15: n = A,T,C or G
acttcccaccacnnngttgaaagggagagcaaagtcttatggataaaccctcctttcttttggggacacatggctctcacttgagaagctcacctgtgctgaatgtccacatggtcactaaacatgttatccttaaaccccccgtatgcctgagttgaaagggctctctcttattaggttttcatgg

SEQ ID NO: 508 - DNA, 189 bp, Homo sapiens
acacaagtgatatttacattttcatatactagtgatatacctgttgcatacttggcaaaataaaactgatagtaagtctataataataaaagaaacaacaattactaagtaaacaattctagatgatggaagagtaacccccatttaagctacagacttagatgtctaaaaatatgtgtcctgatctgt

SEQ ID NO: 509 - DNA, 532 bp, Homo sapiens
  misc_feature 141, 420, 421, 436, 442, 445, 491: n = A,T,C or G
acagtgatagctccccctgggcaatacaatacaagaacagtgggttttgtcaaattggaacaaggaaacagaaccacagaaataaatacattggttaacatcagattagttcatgttacttttttgtaaaagttaaagtanaggggacttctgtattatgctaactcaagtagactggaatctcctgtgttcttttttttttttaaattggttttaattttttttaattggatctatcttcttccttaacatttcagttggagtatgtagcatttagcaccactggctcaatgcgctcgcctaggtgagagtgtgaccaaatcttaaagcattagtgctattatcagttaccaccatttggggcttttatccttcatgggttatgatgttctcctgatgacacatttctctgagttttgnnattccagccaaaganagaccnctncactatttgatggctggctgcatgcagacatttaaagcttttaggngaatacactacaccagggagtatgactactagtatgactat

SEQ ID NO: 510 - DNA, 200 bp, Homo sapiens
actgttcctcacggcagtcaagaggcccaggctctgtgggctccagctctgcatttcctggttctggggttggggctgggatgacttcctgtggacttgctgctgggactggaactggaactgttcctcggagggccgaggagtcacctcttgataatcatagtagtctgggttgtcgatctggtcgctatagtgggtgt

SEQ ID NO: 511 - DNA, 276 bp, Homo sapiens
acagcaaattctatagtgcttctgagcccagcagggctttacctgcccctggagagttttagccgtcttgtgtttcttgtttacttcacaaccaaatttgtcccctcttctctctgttaagggagagaagtcactttagctggataatacctatgtaacaaactgagcagctgttatttgggcaaaatcaaaggaagaaagagactatggtcttctatttattgtgggaaggaaaacagggtggggcgggtgagtgaaaaggtgaaaatccctggt

SEQ ID NO: 512 - DNA, 227 bp, Homo sapiens
acggcagccttcaatgggaaggacttaggttccatgagccacctcacaggttatgaaacagaaagacagcgtcacaacactgctcttctggctgctacagacttactaaaaaggctctattctaccagtgcctccccgcttgtgttgctcaggacgtggggcttgcaggccacaaatgcagtgtctccactcaaagaacagattatggcctttgcaagcaaatgagt

SEQ ID NO: 513 - DNA, 414 bp, Homo sapiens
  misc_feature 12, 13, 130, 296, 297, 365, 388, 400: n = A,T,C or G
acccttgaaaanngaatggaatctccaggagtgagggtttccatggaagccagcactatccttggggacaccactgaccattaacagattaggaagatgtgcccattttacacacagagaagcagcccanagttcagtgccctgcttcagggcagagaccaagttggggagtcaggaactgaaagctgtcttagccagtttgggggtagggtggggtctcaggcctttggcccctgtgactccaagtataaggcatatatgaaggctagtgagctggggttgggatgggatggcanngtgaaaggtcagcatattcctgcctgcaaacccctccccagccttgattgcaggtcagaaggctgcanggggatgtccctatgctggctgngagttcccagcnactcccttgtggtc

SEQ ID NO: 514 - DNA, 440 bp, Homo sapiens
actagatgaagcttatatgcttcaattccctgcatcaggtaactaaggtgcacatcagtagttagttatgttctgtcctttattctctgagttttgagttctgcttttctatgcttttcacgtggtatatattaagctaatgaaggcaattaactaagcttttagaactgcaaaaaaaacaacaacaacaacaacagaggcacaggataccattgtgtcagttccttgtgcaatggaccactgacagatattaactaagtgtttagacaaacacacaaagccacactggagagtcagggccagtattaaagctaatctcatatttatagggcatgttacagtttacaaagccatttcacaaaaatgatctcatttgaactatacctcttgtccatccatcaccccaacacacataaacatagctagatcaggatgtgtgt

SEQ ID NO: 515 - DNA, 324 bp, Homo sapiens
acatgcagaattgtcaactacagggaatgaaaagttcaaaaagtagatcctacaagatgtaacgaatacttttctaaacatcaagatacagctcagaacacttcaataacaagatttggtctacttaggcatccggcttgacagctaaacactttagaccacaaagttaacatcatgttacatacgtcttacagtgcacgttaccccaatctgtgaaaataaaccaacatgaaactcaaaaagcattactagctctgctttagtgcctaaggtatcacagcatcacttagtagacagaaatcttatcttccccttaaagtagtt

SEQ ID NO: 516 - DNA, 505 bp, Homo sapiens
actgccaggtaacgttgttatttcagttgagcctggactgatgcgtgaggttgtagattctccacgacctgaggttgtggagtgggcagatgagggtgttgttccacttgcatctgggctgctgtggaatattgttgatttctcactgtggcccgaagttgtggagctggcagggaagtgtgttgttggagtcgagcctgggctgcggtggtaggttgtagattcttcaacaggggctgttgcggtgctaggaggtgaaggcgtcgtgtgagttgaggctgggtgggtctggaaggtggtagattctccctgaagtccagggcttgtggagctggcaggggacagtgttgtgcgtggtgagccagtgctgctgtggacgcgtgtagatgcttcaacgatgcctgagcttgtggtgctgtcagggaagagtgttgtgtgagtggagcctgggctgctgtggaaggttgtagattcttgaccaaaggataaggctgtggtacctgcc

SEQ ID NO: 517 - DNA, 573 bp, Homo sapiens
  misc_feature 481, 519: n = A,T,C or G
ttgaactgccatgtcctctgaagaaggaaagctcttcgtgggagggctcaactttaacaccgacgagcaggcactggaagaccacttcagcagtttcggacctatctctgaggtggtcgttgtcaaggaccgggagactcagcggtccaggggttttggtttcatcaccttcaccaacccagagcatgcttcagttgccatgagagccatgaacggagagtctctggatggtcgtcagatccgtgtggatcatgcaggcaagtctgctcggggaaccagaggaggtggctttggggcccatgggcgtggtcgcagctactctagaggtggtggggaccagggctatgggagtggcaggtattatgacagtcgacctggagggtatggatatggatatggacgttccagagactataatggcagaaaccagggtggttatgaccgctactcaggaggaaattacagagacaattatgacaanctgaaatgagacatgcacataatatagatacacaaggnaataatttctgatccaggatcgtccttccaaatggctgtatttataaaggtttt

SEQ ID NO: 518 - DNA, 473 bp, Homo sapiens; identical to SEQ ID NO: 200

SEQ ID NO: 519 - DNA, 555 bp, Homo sapiens
  misc_feature 419, 422, 512: n = A,T,C or G
acaaattccagtgtgcagaccacaacctcaaaacaaaaaagatctatttctactggatctgcagggagacgggtgccttttcctggttcaacaacctgttgacttccctggaacaggagatgggggaattaggcaaagtgggttttctaaactaccgtctcttcctcaccggatgggacagcaatattgttggtcatgcagcattaaactttgacaaggccactgacatcgtgacaggtctgaaacagaaaacctcctttgggagaccaatttgggacaatgagttttctacaatagctacctcccaccccaagtctgtagtgggagttttcttatgtggccctcggactttggcaaagagcctgcgcaaatgctgtcaccgatattccagtctggatcctagaaaggttcaattctanttnaacaaagaaaatttttgagttataggaataaggacggtaatctgcattttgcctctttgtatctttcagtaatttacttggtctcgtcangtttgagcagtcactttaggataagaatgtgcctctcaagcct

SEQ ID NO: 520 - DNA, 81 bp, Homo sapiens
  misc_feature 14, 15, 26, 27: n = A,T,C or G
aggatcgtggtctnncctgcagcatnnaggcccaccatgaggatgcgcatttcttttttgccaaaaaggcccttgaagagg

SEQ ID NO: 521 - DNA, 576 bp, Homo sapiens
  misc_feature 14, 212, 253, 414, 457, 541: n = A,T,C or G
gagaaatttagtanattctctttgttagaaactagagttttgaacaattttaaagactataaaattgtttttttttttttttttttaaataaactagttacttgcactttacctgctggcttttccatttggtagataacattctgaactccagcagagttttataatccccacgtgcttaaatatactaaatgttctttttccattaaggntaatgttcgtgaagaaattgaagagttttttccaagaatgnggaagataaatcaagataaaagaaggctaatgaaaagtattaaagatcagaaaattaaaattgaatgggggaaaaaattgaacagaagattggtcagatagaagcacttgaatatttttttaaggctattttgaattgtttgaattggggaagaatacacnaagtatgaaaaatgaaaaactcaatgaagaatgaagagaagtngaaagcaagagtgaagtagaattaaaagaatctggaagaatgaatgggtcctaggttaagtaaatgtatggtttatgttccagngtctgtatgatcaagttgtagatgaatttgcatga

SEQ ID NO: 522 - DNA, 305 bp, Homo sapiens
  misc_feature 16, 270, 271, 291: n = A,T,C or G
acaaagtgacatacanttggaaatccatttttgttgtaaagacattgtttttcagacttttcagatcagttagaaaaatgtcattgctttaaaatcatagctattctgtttaagaggaattgaatttaaaaatgagagagtattaaaactcatgtggcagtatcctggtcttaatcaggtattgcagtgttcaaacaaggtatggacacatcaacatattcaccttttggaaggactagtgacttggttaaaaactaatgagtgtttgcnntgtggtgtttctatgcgagncacccattctcaat

SEQ ID NO: 523 - DNA, 286 bp, Homo sapiens
  misc_feature 13, 14: n = A,T,C or G
acctgagatattnnacagctggacctagtttcacaatctgttgtctccagctctgcatatgtctggccagggggcttctaggaagtaggtttcatctatcaaatgtctcctctgacttccttttgaaacttactgctcttctgttttattttgttttgtttgaagctcagagggagatgggcaattgacagggatgcaatccagggtgggatttcttgaggaagttacaaataagcttgttacaacatcaagatagatggaattggaaggatgctaccaggagagt

SEQ ID NO: 524 - DNA, 170 bp, Homo sapiens
accaagcacttgtatttccgtatattttgtttcgcgggggagtgagggggaagaacacggatgaaaatgtcagtttttgaagggtccatgcacatccctgacacctcacaccttatctaagtctgaagctggggagaaaggggttcatttagacttcatacatttccagt

SEQ ID NO: 525 - DNA, 557 bp, Homo sapiens
  misc_feature 552: n = A,T,C or G
acagacattttctttgtgggtgccttcaggattatataaaaacctcttaaaatttcaacaatatattttgaagtggtgaaatttaaattcgggctcatgcacaaattatttcttattacatctgtcctcaacttagttattgatgtcactaaacatatctatttatgttatgtatttattaacagatgctcattattatttttagcttttatctttaaattttagagaatagttaaataaaacattttttggtattataataatgctacaggatattttttctataatatttgcatatctttatatctttcctagaaagctacctatttttatatgatagttttgttttttagcatcatatagttttaataggaggactcttctcagcattttttgtatggcacatgtagtgttgatataatttttccacgtttggttatctttagaggtctttgctttttcttcatttttgtagcacagttttgctggttatgttattcttacataggaagctatttttcgcttggcacctcaactatagcacacaatttncttct

SEQ ID NO: 526 - DNA, 476 bp, Homo sapiens
acctacaaaggtcacaagacagttgtcactggagagcagatatgggagatccagaaggatcaacttctatacaatccattcttaaaaatgtgcctttcagcaaatggagagcatccaagtttagtgtcatgcaactcatcagatccactccaaaaatggatacttagccaaaatgattaagtgttccttaaaattaagttgaaaaaggaaatattctttctcataaaactgtgactaggcatacactgtagtttttgaaaattatgcaaaagcagctaaatgtaacttattccaagtgcatttttcttatttatatctttatgtagcactactacagaaattctgcaagtttctgtttcaaagcacaataactagtaataccaaagactatttcaaaatgtccagatgtaggggaagagatgtttacagtatgatgaaaataattttccaagtaaagtgatgtttgtgtgttttgt

SEQ ID NO: 527 - DNA, 437 bp, Homo sapiens
gctggatgcttacttgaagacgaggacttttctggtgggcgaacgagtgacattggctgacatcacagttgtctgcaccctgttgtggctctataagcaggttctagagccttctttccgccaggcctttcccaataccaaccgctggttcctcacctgcattaaccagccccagttccgggctgtcttgggcgaagtgaaactgtgtgagaagatggcccagcttgatgctaaaaagtttgcagagacccaacctaaaaaggacacaccacggaaagagaagggttcacgggaagagaagcagaagccccaggctgagcggaaggaggagaaaaaggcggctgcccctgctcctgaggaggagatggatgaatgtgagcaggcgctggctgctgagcccaaggccaaggaccccttcgctcacctgccccaagagt

SEQ ID NO: 528 - DNA, 249 bp, Homo sapiens
acattaaagattttttccaagtaagttacactctgttaacttcctgctagccatcagcatgagccctactgcctaaacactatttcatttatttatgtttggaaaccccgtaaacatttttgtttgcaatcttgtttcttttgttataagtcaagtttgaatgttacaatacttttattgaaacttttgttaagttttttcttgtaaattttctttacttgtgagtatcatcttgtcctttaatcctgt

SEQ ID NO: 529 - DNA, 504 bp, Homo sapiens
acacttctgaaaactgcatattcactttatgtggtttcagaatactgggctcaatactaagaaagacacttcattgagaaattcttaagcttacagaaaacctatactctttgcacattccacataaccctagcaaaatgcagtttcttcatacttctgtcactttttccattggaagatttgcttaggaaaattaattcctatttattcccacaaaatgttggcattgcttgattttacccaatggggaatgtgctttgaatttttggaacacttttacaattaaaaataaagtagggccatttttaatttgtttcatcagaaactatgttaaagagagggttaaatataaatatattttcgtgtgtatttttgggaagatttttgttcaaagcaatagtcaaaatcagatgacctgtccataataattatgtgtcttcatcttctcagaggccccatgctcatatgcacgtgtcattgggatacactcttgggggatttggt

SEQ ID NO: 530 - DNA, 481 bp, Homo sapiens
  misc_feature 410, 427, 459: n = A,T,C or G
acctgtgggtttattacctatgggtttatatcctcaaatacgacattctagtcaaagtcttggtaatataaccaatgttttcaaatgtattctgttatacaaagagcagatttttattgaacttgtgcaataactatattaccatacaatataaatattcatgaatagtttcccaagtctggagcgaccacatagggagaaaatgtaaatgtctcaatttttgttcacaaaagtatattttatcaaattgctgtaagctgtggatagcttaaaagaaaaaaagtttcctgaaatctgggaaacaagacatttaaagaatcagcaaaatttcaaataaaaaattatgaaaatattatcctcattagttcatttagtcccatgaaattaattattttctctgcttgatcttngtggacagtttcatgangctgtcagttagttcattaaagttttggaaanttctcagacagtgcagttggta

SEQ ID NO: 531 - DNA, 210 bp, Homo sapiens
tactggtgtttaatgggggaagaatatgaacagctttaaagagctgtgtattgtggttactactattaaaaaataagatctgcacgagtctgactggcctttgggtggcctttgtggacggctcgtagctggaaagtgttgatctgggttttctggcattcttttaagttaaaaagttaacatcgggacatgggtttgatcttttgttgt

SEQ ID NO: 532 - DNA, 234 bp, Homo sapiens
  misc_feature 15, 17, 18: n = A,T,C or G
caggtactgcaatgncnngctacataaaataaaaaaatctttttaagaggaagctcaataatcagaggctgtattgcatttaaggatttaacactggctatatacaaaagggaaagcatttcaatgagaaatacttcacgttaccaagttctctcctttaatatggcaacattcagcagcttatgctactcttttatcctttggttcccagtgacaaacaatgcagtaataatg

SEQ ID NO: 533 - DNA, 411 bp, Homo sapiens
  misc_feature 12, 336: n = A,T,C or G
acctgtgggtcnattacctatgggtttatatcctcaaatacgacattctagtcaaagtcttggtaatataaccaatgttttcaaatgtattctgtcatacaaagagcagatttttattgaacttgtgcaataactatattaccatacaatataaatattcatgaatagtttcccaagtctggagcgaccacatagggagaaaatgtaaatgtctcaatttttgttcacaaaagtatattttatcaaattgctgtaagctgtggatagcttaaaagaaaaaaagtttcctgaaatctgggaaacaagacatttaaagaatcagcaaaatttcaaatnaaaaattatgaaaatattatcctcattagttcatttagtcccatgaaattaattattttctctgcttgatcttgg

SEQ ID NO: 534 - DNA, 418 bp, Homo sapiens; identical to SEQ ID NO: 310

SEQ ID NO: 535 - DNA, 220 bp, Homo sapiens
acaaaaccataatgatgttcacaggaacttcattacaacaattcactttaaaacattctgcaaatatataacttccttctcctcaattttagaaaataaatttcacatcccaacatataaaacagatacactcctacttctctcaaattagcattttaacatcttccaataacacaccattttcatataaaaatacctttaaaccaaggttcattcctgt

SEQ ID NO: 536 - DNA, 421 bp, Homo sapiens
actgctatttttaaaaccaaaaagagacagcgtgacgatgcgtaaagcatttttcttagcctttcctttgtcttgatctgttaatgagaacaaaactgccagactcaaaatactctactattgtgctgaaagaaatacaatttagattgcacaaaatttgaaaatataactcagctgtcttttaaaagagttgtgttgttatctacaagactattagcagtcttttttcagagcaaattttaacagctagttgtgagtggtttaaaatatagaaaattattaaaatcttagtttgaggggttttatagtgggagaaaaaacaggaccaaagtttatgtgccttcttcagtagtcttaattgaccttttcttcctatttgagactaaagtagtatcagtattctggttttcaggaaatatgt

SEQ ID NO: 537 - DNA, 76 bp, Homo sapiens
gttttctttatttctttttcagatagtttgttgttagtgtatagaaatgctactgacccttatatcttgattttgt

SEQ ID NO: 538 - DNA, 274 bp, Homo sapiens
  misc_feature 119, 255: n = A,T,C or G
accccagagcctagcaggccgacaagcaaggactctagctcccccagagctctgggcctgccccattcagagtgagcatctagacatggccccatttttcagtgacctgggaagcgaanaagaggaggtggaattttggccaggacttacttctttgacattgggatctggacaggcagaagaagaagaggaaacctcttcagataactctggtcagaccagatattattctccctgcgaagagcatcctgcagnagaccaaccagaatgaagg

SEQ ID NO: 539 - DNA, 349 bp, Homo sapiens
  misc_feature 331: n = A,T,C or G
acaataaataattatttaaaagtcatagctccagtcactactgaaaacataattttggtgataaacataatttgagaaacttaatttctgaatgtttttatagaaaattactgaaagtctattactcatggaagacttttaaagaataaccttttttcctgttttataaattcccattgttatatggtagtatttcagctacacaatattttagcttttagctagacatttatagcttttcatttgttgaaatggtaatcatctgcatgtttttgtcacttatttcaggttagtgattgcctaacacttataagccaaaataatctttgcnaaaattccatacctaaaa

SEQ ID NO: 540 - DNA, 129 bp, Homo sapiens
  misc_feature 9, 48, 71, 74, 123: n = A,T,C or G
accattggnggccaattgatttgatggtaagggagggatcgttgaccntcgtctgttatgtaaaggatgcntanggatgggagggcgatgaggactaggatgatggcgggcaggatagttcanacggtt

SEQ ID NO: 541 - DNA, 220 bp, Homo sapiens
acttgaaacagttctgtgtttgttttttttccttagcgtttagaatagccatcattgtcctgcaataggcagagctatcacgtccaggaaaaatgagggagggaaccacagaggcagcgtgagatccaaatacagcattcaaaggtaattggtccagtggtgcctggggagggaggaagggtgatactccagggttagccgtcttcttttgggggtgtgt

SEQ ID NO: 542 - DNA, 482 bp, Homo sapiens
acctgtgggtttattacctatgggtttatatcctcaaatacgacattctagtcaaagtcttggtaatataaccaatgttttcaaatgtattctgtcatacaaagagcagatttttattgaacttgtgcaataactatattaccatacaatataaatattcatgaatagtttcccaagtctggagcgaccacatagggagaaaatgtaaatgtctcaatttttgttcacaaaagtatattttatcaaattgctgtaagctgtggatagcttaaaagaaaaaaagtttcctgaaatctgggaaacaagacatttaaagaatcagcaaaaatttcaaataaaaaattatgaaaatattatcctcattagttcatttagtcccatgaaattaattattttctctgcttgatcttggtggacagtttcatgaagctgtcagttagttcattaaaagttttgggaaattctcagacagtgcagtggta

SEQ ID NO: 543 - DNA, 127 bp, Homo sapiens
aagaaaaatgcccccgttgttggaagtatacagcggagtcttcagatacactgtgtcctcgatgtgcagaagttgtcagtggaaaatagtattaacagctcactcgagcaagaaccctcctgacagt

SEQ ID NO: 544 - DNA, 448 bp, Homo sapiens
actcatccacttttcattttagaaataaacaggcctaagaaacgaaatatcctgcctgaaataatagattggtaaccttcctagtagaaaagtgtcaaaaatccaggatattttgagataagatacaccgatcacatacagaaagaggttttctttttctattttttcccttttttaatcatgtaattatcacaaagacaaaaacagaagctttttttaagtttttttttttttttctttttttgagtcgagggtctcactctgttgcccaggctggagtgcagtggcttgatcatggctcaatgcaaccttgaactcctgagcccaagcaatcctcctgcctctgcctctgcctcctgagtagctgggactataggtcaccaggccagggtaatagagatgggggtatcgctgtgttgcccaagctggtctcacctcaagtgatcct

SEQ ID NO: 545 - DNA, 325 bp, Homo sapiens
  misc_feature 226, 260: n = A,T,C or G
acagcattctggaataaagcaagagtgttcattcacacacacagtagcttcaaaactgttcgatctgtttgttcccatgtagttttctaaagatggaaaaaaaggactttggtcatcaagactactgtggccatattagattactggaacatctaagcatcagtgtgtgaccatgcgaacaaaagacttcggggagtgtctatttttaaaaaggtttatgtgtgtngaggcagttgtaaaagatttactgcagaatcaancccacttttaggcttaggaccaggttctaactatctaaaaatattgactgataacaaaaagtgtt

SEQ ID NO: 546 - DNA, 281 bp, Homo sapiens
  misc_feature 218: n = A,T,C or G
actgcggccgttaaacatgtgtcactgggcaggcagtgcctctaatactggtgatgctagaggtgatgtttttggtaaacaggcggggtaagatttgccgagttccttttactttttttaacctttccttatgagcatgcctgtgttgggttgacagtgagggtaataatgacttgttggttgattgtagatattgggctgttaattgtcagttcagngttttaatctgacgcaggcttatgcggaggagaatgttttcatgttactttatactaacatta

SEQ ID NO: 547 - DNA, 396 bp, Homo sapiens
  misc_feature 12, 13, 114, 326, 327, 328, 363: n = A,T,C or G
gctccatctgcnngactcacccttctatagaagtaaatttgccttgctggagtgttaacttgttgttggagtgctaactcttctttgtggcaccaaaaagttatttccaacacnaagctgcacccttggtggagggaacatctgacgaagttcaatgtttggggaaaacaatatctggaaagattgaagagtcagcaggagaaacacctaggaaaattacaaggcctgtgaaagaaacatctgagaaatttgcatggccacaagaaagacctacaaaggccacatgggaggaaaaagaaacatctgtaaagactgaatgcgtggcnnngagtaacatctaataaaactgaaagtttttggaanaaggaacatctaagatgatcacatgtcctacaa

SEQ ID NO: 548 - DNA, 295 bp, Homo sapiens
  misc_feature 186, 232, 251, 252, 268: n = A,T,C or G
acaattttggataaatagcacatttataagaaccgcaatgaaaactgacttgaaataatgcttgtaatcaggaaagtaatttcatccaccgatttcaaaaccagattcactgagcataaaagtcaatacatatttgaggaataagtctcctaaaattttaagcttcacgtaataatgtttgcatancaaaatatttctgcttcaagcctttaggaattaagatctgatcagnaatttaactaaagggtagnntgttttacaatgaagnactaaaacctgaacaagatgttgcatg

SEQ ID NO: 549 - DNA, 518 bp, Homo sapiens
acagattatttgttatgacaataaaacactcaaaataaatggtctttagcatctcaaattccaactgaaatcattttagtattaactcttcttcccaaagcaatgtctcatttcttggctgtgcaggtgatgccatgttatatccaataactagaaaaatcactgtgctgaacttttatgtttagcttccaagtatttttctaatgttttgcatttcaagtggtatcactgttaaatgccatttgttttcagattgtggccttttattattggctgctagatcctggtgtttctatgttcttttttaagcaccaaaaagaagatggggaagaaaagaaggaaaattttctgatataaatatgttgttcaaattatgagtattatttaaaaaagaaaaaggaacataacccaggagtctaagttaaatctaatattgttaatactgaacttgcaggtccaggttggtatacattccacccctctagaagtattttcttacagtagataagctgctcaca

SEQ ID NO: 550 - DNA, 118 bp, Homo sapiens
  misc_feature 15, 30, 71: n = A,T,C or G
ttttttttttttttnctacttaaaaaaganaagttttattagggcaatttcactttatttttccatacagnaaagtcaactactgcagtaataataaaataagcataaaacaaattgc

SEQ ID NO: 551 - DNA, 451 bp, Homo sapiens
  misc_feature 380: n = A,T,C or G
actcttattcagttccttggtgatgctattgttttgccagcgggagcacttcatcaggttcagaattttcacagctgtattcaggtaactgaagattttgtgtctccagaacatcttgtagagtcatttcatttaacacaggaactgagacttttgaaggaagaaatcaattatgatgataaactacaggttaaaaatattttgtatcatgcagtcaaagaaatggtgagagccttgaagatacacgaggatgaagtagacgatatggaagaaaattaagtgtgatccagtttgatatttttaggttgttgaactgggattacttaaccttgaatgatgatatgtatgcacactgactttaagcttcataaaaccatcantgccaagaaatttctctttgtagtaatttacttgttactgacaccacagcagtatagcatatgtcacagct

SEQ ID NO: 552 - DNA, 182 bp, Homo sapiens
accgatggaattggcacagtcgctttttgttaaatggatcccaaatatttacaaagccatcagaaccacctgtggcaaatgtattgtggatattgtgaaaagaaatggcattgactgggtaaatctgctcaatattattttcttttagtctgtgacatttgaaggcatacttcttcttctgt

SEQ ID NO: 553 - DNA, 227 bp, Homo sapiens
  misc_feature 145, 198, 209: n = A,T,C or G
ttttttttttttttttttttttttcgctctaaagatactttttatttaaatattttatgatgatacatatacaaatataatcttccaaaaaacaaatgtaaaactaatacaaatcactttttcaggaacaaagaaaatcatttanaaaatgtgattatgctaaaagaggcaggttaggtttccaaggctgctcaaggnggaagcttaanaccaacttttgtttgagt

SEQ ID NO: 554 - DNA, 212 bp, Homo sapiens
acagaaaaatggtgatggagacaattgagaaaattatgggtaatttgggagcagcagatattgatcataaacttgaagaacaactgattgatggtattctttatgctttccaagaacagactacagaggactcagtaatgttgaacggctttggcacagtggttaatgctcttggcaaacgagtcaaaccatacttgcctcagatctgtggt

SEQ ID NO: 555 - DNA, 180 bp, Homo sapiens
  misc_feature 21, 89, 166: n = A,T,C or G
acagggaggaatttgaagtanatagaaaccgacctggattactccggtctgaactcagatcacgtaggactttaatcgttgaacaaacnaacctttaatagcggctgcaccatcgggatgtcctgatccaacatcgaggtcgtaaaccctattgttgatatggacntctagaataggatt

SEQ ID NO: 556 - DNA, 376 bp, Homo sapiens
acaattaacacaaaatgttctgagggtagtagcttttcatgcactgaagaatgagatcctaacaacattgcacatcttggatacattagaaattttaaaagccatgtgtaatttcagaaaacttaataccgtcatgaaagacattttcaacacaaaatttaggcactctatactttggaatagccataaaatattccaacaagagttaatgcactttgtgattacatctactcaaagataattctcaattaaaatctatacttattaaataacattttaaattagagcccattaaattttgataattactgtgaaatatttgcagcattgtgttgtagttaaataatgctgaactacttctattactgactctagt

SEQ ID NO: 557 - DNA, 195 bp, Homo sapiens; identical to SEQ ID NO: 8

SEQ ID NO: 558 - DNA, 195 bp, Homo sapiens; identical to SEQ ID NO: 8

SEQ ID NO: 559 - DNA, 135 bp, Homo sapiens
  misc_feature 37, 82, 101, 120: n = A,T,C or G
acaagctttttttttttttttttttttttttttttgntttttttttttttttttttttttttaggaaaactgaatcaaacanattttattcaactttttanatgaggaaaacaaatgatncaaaataagtcataa

SEQ ID NO: 560 - DNA, 386 bp, Homo sapiens
ctttctcagaagtttgagaaagaactttccaaagtgagggaatatgtccaattaattagtgtgtatgaaaagaaactgttaaacctaactgtccgaattgacatcatggagaaggataccatttcttacactgaactggacttcgagctgatcaaggtagaagtgaaggagatggaaaaactggtcatacagctgaaggagagttttggtggaagctcagaaattgttgaccagctggaggtggagataagaaatatgactctcttggtagagaagcttgagacactagacaaaaacaatgtccttgccattcgccgagaaatcgtggctctgaagaccaagctgaaagagtgtgaggcctctaaagatcaaaacacccctgtcgt

SEQ ID NO: 561 - DNA, 341 bp, Homo sapiens
actggattttaaatctgtatgtatctgtttgatttttttttctaatatttcagttgagctgctgttttcttccatgcaatattgtatactcaattgtgtatagaagaagctggtgagagtgccctcctacataaataagcaattgcagtgttttgcatgcaaaatataaaaaatttaaattgtcctgattctattttgtaaatggagaaacaatcatatctttctaagcggtaatggaggaagactagtgctttgtgcattttgatatatttgagttcattttttccacaatgtcatacttttgacgcagttgggtttctcataagtatcctagttcatgt

SEQ ID NO: 562 - DNA, 347 bp, Homo sapiens
acctctgcatacagatatattataaaacacaagcaatgttatttatgaaactgtgatgcagtcttcaacatcaagaaaaaatgacaactataataaaatttacaacacagtttcacagtctaaatgctatgttcctttaagtattttcatatttttaatcatttattaagagaaaattgtgaaaagttaatttggccttatagagagattcaggatagatgtagcctatagatgtgtcattttaataagttgggatacatgtttagtttttccttatattcctgttcagtgaacagatttttcataattctcacttgttaaagtgctgcaaaaattgcattttcagt

SEQ ID NO: 563 - DNA, 92 bp, Homo sapiens
acaggactaggaagcagataaggaaaatgattatgagggcgtgatcatgaaaggtgataagctcttctatgataggggaagtagcgtcttgt

SEQ ID NO: 564 - DNA, 253 bp, Homo sapiens
  misc_feature 241, 242: n = A,T,C or G
gttgaggggggggcattagtgctgatagctgtgtgtgttagcttgtatatatatttttaaaaatctacctgttcctgacttaaaacaaaaggaaagaaactacctttttataatgcacaactgttgatggtaggctgtatagtttttagtctgtgtagttaatttaatttgcagtttgtgcggcagattgctctgccaagatacttgaacactgtgttttattgtggtaattatgttttgnngattcaaactt

SEQ ID NO: 565 - DNA, 174 bp, Homo sapiens
acctattctttgcagtctcaggaattgttgacatgctcacctatctggtcagccacgttcccttgggggtggacagactggttatggctgtggcagtattcatggaaggtaattttgtggaacggatggagaggaaggagagcctgacaagtcatatttatgaaggatcagagt

SEQ ID NO: 566 - DNA, 195 bp, Homo sapiens
accattggtggccaattgatttgatggtaagggagggatcgttgacctcgtctgttatgtaaaggatgcgtagggatgggagggcgatgaggactaggatgatggcgggcaggatagttcagacggtttctatttcctgagcgcctgagatgttagtattagttagttttgttgtgagtgttaggaaaagggcgt

SEQ ID NO: 567 - DNA, 462 bp, Homo sapiens
  misc_feature 325, 376, 418, 435: n = A,T,C or G
accctcttcaagaatcggatggatgtcgttttgaagggcgacaatcttcctcagtatagaggggtgaacattcggagattgctcaacggtagcatcgtggtcaagaacgatgtcatcctggaggcagactacactttagagtatgaggaactgtttgaaaacctggcagagattgtaaaggccaagattatgaatgaaactagaacaactcttcttgatcctgattcctgcagaaaggccatactgtgctatagtgaagaggacactttcgtggattcatcggtgactccgggctttgactttccaggagcaatgcacccagaangctgccgataggatatacccagtttctactatgtggatgtcttggatgggnaagctggcctgtgtgaaacaagttgcaccaaaaggaacgaantcgcaaaatgaactgtnacctgggcacatgtcagctgcaacgca

SEQ ID NO: 568 - DNA, 412 bp, Homo sapiens
  misc_feature 379: n = A,T,C or G
acctgtgggtttattacctatgggtttatatcctcaaatacgacattctagtcaaagtcttggtaatataaccaatgttttcaaatgtattctgtcatacaaagagcagatttttattgaacttgtgcaataactatattaccatacaatataaatattcatgaatagtttcccaagtctggagcgaccacatagggagaaaatgtaaatgtctcaatttttgttcacaaaagtatattttatcaaattgctgtaagctgtggatagcttaaaagaaaaaaagtttcctgaaatctgggaaacaagacatttaaagaatcagcaaaattttcaaataaaaaaattatgaaaatattatcctcattaagttcaatttagncccatgaaattaattattttctctgcttgatct

SEQ ID NO: 569 - DNA, 401 bp, Homo sapiens
accacctcaagtgcctccccagctcaatctccttgttacagtaaccagtcagatgacggctcagatacagagatggcttctggttctaacagaacaccagttttttcctttttagatctcacttactggaaaagacagaagatatgttgtgggatcatctataaaggccgttttggggaagtcctcattgacacacatctcttcaagccttgctgcagcaataagaaagcagctgctgagaagccagaggagcaggggccagagcctctgcccatctccactcaggagtggtgactgaggtttttatgtagaaggggaacaaaaaaaaaatatctgaattttgaaaaaccacaaagctacaaaactgaccctcttttttttttgagacggagttttgctct

SEQ ID NO: 570 - DNA, 166 bp, Homo sapiens
acatatagacagcaatgttattaggagcattaaattaaaaaactgaacagcctaatttaaatgtggcttgggcctggtagaagtttgaccaaatggaatggaggctgtgagcaatgtgaggattctatttatttatttacgtttgataaaacttactggaactagg

SEQ ID NO: 571 - DNA, 492 bp, Homo sapiens
  misc_feature 345, 394, 402, 453: n = A,T,C or G
actccagcctgggcgacagagcaagactccacctcaaaaaagaaatatttagcaaatattaaaggacaagagggaatatctgtttaaaaaattataatgcacgttagatgaaaagtaataggatgagatggttgttgctgaaatagcacttgctatataaattcaaacattccttttcaaattcagcttctcagaggtttgacttcagatgcttgagcactttcaacattatctttgcctttatccttctttatgcggataaacacaactgctaaaattataccaatcaccagaagggtggtcagcagtataccaactgccatgcccacagtgggtaatcccagntctggtgacctgctggccggaaacaacttccttccacacaactgcagantgtaactngtaaagaaacaatgccttccaagggtggccgacccccatcattgatgcggntcaagacgacatacgccctctcctcaaagtctgtgtgcc

SEQ ID NO: 572 - DNA, 408 bp, Homo sapiens
  misc_feature 9, 12, 259, 262, 383, 385: n = A,T,C or G
acctgtggnttnattacctatgggtttatatcctcaaatacgacattctagtcaaagtcttggtaatataaccaatgttttcaaatgtattctgtcatacaaagagcagatttttattgaacttgcgcaataactatattaccatacaatataaatattcatgaatagtttcccaagtctggagcgaccacatagggagaaaatgtaaatgtctcaatttttgttcacaaaagtatattttatcaaattgctgtaagcntgnggatagccttaaaagaaaaaaagttttcctgaaatctgggaaacaagacattttaaagaatcagcaaaaattttcaaataaaaaaatttatgaaaattattatcctcattagttcatttantnccatgaaatttaattatttttct

SEQ ID NO: 573 - DNA, 195 bp, Homo sapiens; identical to SEQ ID NO: 8

SEQ ID NO: 574 - DNA, 322 bp, Homo sapiens
gcccgcggagtatacaccatgagcaaagctcaccctcccgagttgaaaaaatttatggacaagaagttatcattgaaattaaatggtggcagacatgtccaaggaatattgcggggatttgatccctttatgaaccttgtgatagatgaatgtgtggagatggcgactagtggacaacagaacaatattggaatggtggtaatacgaggaaatagtatcatcatgttagaagccttggaacgagtataaataatggctgttcagcagagaaacccatgtcctctctccatagggcctgtttttactatgatgtaaaaattag

SEQ ID NO: 575 - DNA, 358 bp, Homo sapiens
acaaaaaatggcaggaatagaaattacagaggaaatgacaatggagcaactagaggctatgactggtggagagcagctaaaagctgagggtggttattttggtcagatcagaaacactaaaaaatcctctcagagattaaaggatgctctattggaccatgatcttgcccttcctctctgtctgcttatggctcagcagagaaatggggtaatctttcaggaaggtggagagaaacatttgaaacttgtgggaaagctctatgaccagtgtcatgatgccctggtgcagtttggtgggtttttagcatctaatctgagcacagaagattatataaagcgagtgccttcaattgatgtt

SEQ ID NO: 576 - DNA, 111 bp, Homo sapiens
gcgcaagtaggtctacaagacgctacttcccctatcatagaagagcctatcacctttcatgatcacgccctcataatcattttccttatctgcttcctagtcctgtacctg

SEQ ID NO: 577 - DNA, 381 bp, Homo sapiens
  misc_feature 29, 108, 140, 156, 170, 192, 231, 255, 271, 273: n = A,T,C or G
aaccagaatagcatactgtgataatttantggacttagttatttcaaaagatattattccacttccctgctaaatgaaattaatcatcacctttgactttcaagaggngaaaatagcgtgtaataaagcatatcttttantcatcaggcctactgngaaaagcaaatacngactggatatattatatactanctggtattttttgcttcaattggattttatctcttttgntaaaaaaacatgatttcatcttgnaactgaactgcacatntnatatcagagaaaatcttctaatggcatgacttgtaaaatctctaccccaacaaattagtttgataatctaggagttacctttatctgaaacataatgagttatgttct

SEQ ID NO: 578 - DNA, 415 bp, Homo sapiens
acaaagcagcaactgcaatactcaaggttaaaacattagaaaagcatttgtgtgacaggtatattacagtattatcaaaatattacattttcagacttacttagcagataatcatccaccagagcttaaatctttaaattatttccatagtcttaaaaaatatgtaatgtcagaatgcatataaaaagaatgtaaaaggaaacctaaaatacaaatggaataatgtaacaaataaatatttgatttcagtaactgttaataatcagctcaacaccaccattctctctaaactcaatttaattcttataggaataatgaactgtcaaatgccatggcataattatttatttccaagctatcatcaatgattagaaactaaaaaaaatttggcataaaaaaaatcacaattcagcat

SEQ ID NO: 579 - DNA, 556 bp, Homo sapiens
  misc_feature 486: n = A,T,C or G
acaatcttaaaaatttgctgattcatagtttgtaaaacaaaaaccttacaaaactcatcaaaactcgcaaactgatcagaaaagtttctcggaagactagaaaaaatactttattgtcttaatcatgcattacacaaacaaaatctttagttacaccataaaattaagcacatctaaaaaaataaaacagggataactagtcaaaacacagcagatttctgtatcctgattcaactatttttgtatcctatttgtaatgcaaataaaactttactccaaatatttttaaacaagttagttttgtttggaatcatggtaaaccaagatatatatcttagggggaaaccaccttggtttgtaatttaaactataaaatactccatttttagtctattttagactattcaaagagttccaaaatagatatacaggttccttttaggcacattaataaaaggatataaagaccaacaaaaaagtggaatnaataataggccattaagcaaagatggataatccttgataaataaacttgtaaatacagtaagatgtacct

SEQ ID NO: 580 - DNA, 242 bp, Homo sapiens
  misc_feature 9: n = A,T,C or G
accaagcanggaatcgcagggaaatcattcgttttcggggcatatggaacaggtagacagtgtcaaggacttggtccttgggcacctggcaaggataaaagagggggagacttaaggtaggggacctataattccccattctctaaaggcacaatgtataccctgaggggcccactctcacaagaagactcttaaaagagccctgccaaaccatcaggttgatgacccggaagtccttctgc

SEQ ID NO: 581 - DNA, 352 bp, Homo sapiens
ttttattattttacagttgttcaggaaacttcccaggatgttgtaaccaagatttaatcaccacagtagatttagagcagatcagtcagcccacttgtcttctctcttctttagggagaggctaggcagtgaacacatcacgtatgcaatgagaaaataaccaactggtaggatgggggaggggaggggaggcagggaataggcacaaatggaattctatcctggctgtccttctcaggtctatctatatttaattttgtcttctctatattctccttccattgccacagagggcagagacaatggggctgagaaactgtaataactgtcactaacagcaaagtagcttagt

SEQ ID NO: 582 - DNA, 432 bp, Homo sapiens
  misc_feature 12: n = A,T,C or G
acctagactcanatacagagaaggaactgcaagcactttatgcactacaagcatcgatagtaaaacttgatcaacctgccaatttgctgcggatgttttttgattgtctatatgacgaggaggtgatctccgaggatgccttctacaaatgggagagcagcaaggaccctgcagagcagaatgggaagggcgtggctctgaaatccgtcacggcattcttcacgtggctgcgggaagcagaagaggagtctgaggataactaaaacttcaaatacacaaaatgaaacaaaagaaacaatttaagtatttttttaaaaagtttcacgtcttcgccaatcacagtgcagcaaggccaattctcgcagaaacccccacgtgtgcacgagtgggagaggggaaagagaaaaaaaggtgatcatggaggaaaaaggt

SEQ ID NO: 583 - DNA, 307 bp, Homo sapiens
  misc_feature 25, 70, 71: n = A,T,C or G
cggcctgggtgctggcgaagcggangccggagttaatacacgaggaactcatgcaaaggaggggactttnngaaatccaaacttagagtgccttgtatttagaatccggaaggaaaaggaaatgaaatgtgaagaaactcatgcaccaaactcgaactggtaagaagactgttagaatgccctcggtaacacagaggctgagagatcctgacataaatccttgtttgtcggaatctgatgcttccaccagatgtctggatgaaaataactatgacagggaaaggtgttccacttactttcttgaggt

SEQ ID NO: 584 - DNA, 171 bp, Homo sapiens
  misc_feature 59, 152, 158: n = A,T,C or G
cttttttttttttttttttttttttttgatttttttttttttttttttttttttttaanacaaatttaaaacaaacttaactttatttcctcactttcacttaaaacttgattttataaaacacatgaaaaaacatttttaaaagttctgtntcacanaacattaaacagt

SEQ ID NO: 585 - DNA, 414 bp, Homo sapiens
  misc_feature 347: n = A,T,C or G
acaccgactacggcggactaatcttcaactcctacatacttcccccattattcctagaaccattggtggccaattgatttgatggtaagggagggatcgttgacctcgtctgttatgtaaaggatgcgtagggatgggagggcgatgaggactaggatgatggcaggcaggatagttcagacggtttctatttcctgagcgtctgagatgttagtattagttagttttgttgtgagtgttaggaaaagggcatacaggactaggaagcagataaggaaaatgattatgagggcgtgatcatgaaaggtgataagctcttctatgataggggaagtagcgtcttgtanacctacttgcgctgcatgtgccattaagatatataggatttagcctataaatttaactttgacaaag

SEQ ID NO: 586 - DNA, 308 bp, Homo sapiens
  misc_feature 15, 16, 48, 159, 160, 163, 181, 182, 191, 201, 202, 209,228, 232, 251: n = A,T,C or G
acaattgctctattnngtcactacgaaaaggctggagcttaatgcatnctgggagactcacacatttgcatgaaggacttcctgttaaaaatggaacaagatacattgcagtgtcatttatagatccctaagttatttacttttcattgaattgaaatnnatnttgggtgaatgactggcnngaacacgtntttgaagttnnggctganaagatgagaggaatatttnaatnacatcaacagaacaacttnacttttgggccaaacatttgaaaaacttttttataaaaaattgtttgatattttctt

SEQ ID NO: 587 - DNA, 140 bp, Homo sapiens
  misc_feature 71, 72, 73, 109, 110, 122: n = A,T,C or G
accattggtggccaattgatttgatggtaagggagggatcgttgacctcgtctgttatgtaaaggatgcgnnnggatgggagggcgatgaggactaggatgatggcggnnaggatagttcanacggtttctatttcctga

SEQ ID NO: 588 - DNA, 236 bp, Homo sapiens
accaactagaagtgggtcatagatagattaccagggatgcagtggtgtttaggcaggataggtctttactggccctgactgctgttaataattggcagcagtgctccccagatcccagaaggtccctgctggagtgtttccagtgcacctgtagggaaccaactagacttctctcctggttagtccagctctttactctaaaccctttctgtccaaaatgagtcattttcagttgt

SEQ ID NO: 589 - DNA, 336 bp, Homo sapiens
acaccacctccaaaaataaaaaatggaaaacacacctttagtgaagtagaagtatttgagtatcttgatgcagtaacttatagttgtgatcctgcacctggaccagatccattttcacttattggagagagcacgatttattgtggtgacaattcagtgtggagtcgtgctgctccagagtgtaaagtggtcaaatgtcgatttccagtagtcgaaaatggaaaacagatatcaggatttggaaaaaaattttactacaaagcaacagttatgtttgaatgcgataagggtttttacctcgatggcagcgacacaattgtctgtgacagtaacagt

SEQ ID NO: 590 - DNA, 403 bp, Homo sapiens
acctgtgggtttattacctatgggtttatatcctcaaatacgacattctagtcaaagtcttggtaatataaccaatgttttcaaatgtattctgtcatacaaagagcagatttttattgaacttgtgcaataactatattaccatacaatataaatattcatgaatagtttcccaagtctggagcgaccacatagggagaaaatgtaaatgtctcaatttttgttcacaaaagtatattttatcaaattgctgtaagctgtggatagcttaaaagaaaaaaagtttcctgaaatctgggaaacaagacatttaaagaatcagcaaaatttcaaataaaaaattatgaaaaatattatcctcattagttcatttagtcccatgaaattaattattttctctgct

SEQ ID NO: 591 - DNA, 447 bp, Homo sapiens
acacctttgactacagctgcagaagtgttcctttagacaaagttgtgacccattttactctggataagggcagaaacggttcacattccattatttgtaaagttacctgctgttagctttcattatttttgctacactcattttatttgtatttaaatgttttaggcaacctaagaacaaatgtaaaagtaaagatgcaggaaaaatgaattgcttggtattcattacttcatgtatatcaagcacagcagtaaaacaaaaacccatgtatttaacttttttttaggattttgcttttgtgattttttttttttgatacttgcctaacatgcatgtgctgtaaaaatagttaacagggaaataacttgagatgatggctagctttgtttaatgtcttatgaaatttttcatgaacaatccaagcataattgttaagaacacgtgtat

SEQ ID NO: 592 - DNA, 453 bp, Homo sapiens
  misc_feature 9, 38, 39, 412, 413: n = A,T,C or G
acaaagcancaactgcaatactcaaggttaaaacattnnaaaagcatttgtgtgacaggtatattacagtattatcaaaatattacattttcagacttacttagcagataatcatccaccagagcttaaatctttaaattatttccatagtcttaaaaaatatgtaatgtcagaatgcatataaaaagaatgtaaaaggaaacctaaaatacaaatggaataatgtaacaaataaatatttgatttcagtaactgttaataatcagctcaacaccaccattctctctaaactcaatttaattcttataggaataatgaactgtcaaatgccatggcataattatttattttccaagctatcatcaatgattagaactaaaaaaaattttggcataaaaaaaatcacaattcnncataaataaagctattttttagcttcaacactagctagca

SEQ ID NO: 593 - DNA, 323 bp, Homo sapiens
acagcattctggaataaagcaagagtgttcattcacacacacagtagcttcaaaactgttcgatctgtttgttcccatgtagttttctaaagatggaaaaaaaggactttggtcatcaagactactgtggccatattagattactggaacatctaagcatcagtgtgtgaccatgcgaacaaaagacttcggggagtgtctatttttaaaaaggtttatgtgtgtcgaggcagttgtaaaagatttactgcagaatcaagcccacttttaggcttaggaccaggttctaactatctaaaaatattgactgataacaaaaagtg

SEQ ID NO: 594 - DNA, 416 bp, Homo sapiens
actctaggtctgttgattacttaaagtagctaaaatggaaatacattgctggaaaagaaagttaattccttagccttaataaaacctttttatatttactgacctttaatatgaaatcagatacctttccttagctggtttaaatctaggtcctcttttggactattgtttcaggttgaatttccctgaaagcagacactctgaaatggaaatctgagcacagcaaatttactagggaggcctcttgggaccaatgccatgtaaaggaagaaagccagatttccatgggagaagttggactgtgatacagtttcaataacccacacggagagctctgaaagctgggatggtccctcagagttgtctcaagttggggttgagaggagctggacgtttatatccccaatcattagatg

SEQ ID NO: 595 - DNA, 357 bp, Homo sapiens
acacattgaaattggacccgatggcagagttaccggtgaggcagatgttgaatttgctactcatgaagatgctgtggcagctatggcaaaagacaaagctaatatgcaacacagatatgtggagctcttcttaaattctactgcaggaacaagtgggggtgcttacgatcacagctatgtagaactttttttgaattctacagcaggggcaagtggtggcgcttatggtagccaaatgatgggagggatgggcttatccaaccagtctagttatggaggtcctgctagccagcagctgagtggtggttatggaggtggttatggtggttcagagcagtatgagtggatatgaccaag

SEQ ID NO: 596 - DNA, 462 bp, Homo sapiens
  misc_feature 217, 418: n = A,T,C or G
acacttttgttacagttacatatatgaatagttagcagaggagaaactcctccgttgttcctacaccaagggaaaaaatgtaaggactgtatagctcatgaataatattaacatttttctatcacaaaatattgataaaattggaattgtatcaattcatgttatggagcttaacattttagccgaaatattaagataatataaataaggcttttancttcatatcaagacctatttgaacacttctagaaaagaacattaaaagttttttcctcatttatggtttgatttagtgtagttgcctcaactgttcttaatggtgtcttagtataatgcataattatttagaatataattataaggcatttacagaatttttatgtggatacttgcaaagatattttcagtccaaaacttnaaattacacacccaaatatgttttgttgccttaatctatacttg

SEQ ID NO: 597 - DNA, 329 bp, Homo sapiens
  misc_feature 12, 40, 289, 290, 291: n = A,T,C or G
acagacctaacnaactgttagattctccaccatcacttanggtttgcccagaagcaacaccagagaattacagacaacgcgcttttgctgaactgtccattttggtggttgtgtttttcagtcaaatataagcaggatgggcgatagagatatatttatatatagatacatattctatatatctaatgcctaaatatgggtattaaagggaaaatttttaaagtctgattaaatccaatatgacatgaaattaaatatatggattagtaaggaaaaatgttaaaaagtnnngaggataccaagaagattaaactggactagccttattt

SEQ ID NO: 598 - DNA, 288 bp, Homo sapiens
acaattacccaccactggatttgactcagagaggacccccagagggtgtctccatcttccctatttattttcagcccttgagggcttcattgtagatcaaagccaaggcccccaggaaggtgacatactcctggaagttcacctcctggtccttgttccggtccaagtcttccatcagccttgcaatttcagcatcctgcagcttcgagccaatggtgagctccttctggatcagctccttcagctccttcttgctcagggtgtgcttgtcaccctccctgccggagt

SEQ ID NO: 599 - DNA, 411 bp, Homo sapiens
  misc_feature 221, 227: n = A,T,C or G
acagtgagtccctggcccggtatggcaagagcccatatttatacccgctctacggcttgggcgagctgccccagggttttgcaagattgagtgccatctatggggggacatatatgctgaacaaacctgtggatgacatcatcatggagaacggcaaggtggtgggcgtgaagtctgagggagaggtggcccgccgcaagcagctgatctgtgaccccagntacatnccggaccgtgtgcggaaggctggccaggttatccgcatcatctgtatccttagccaccccatcaagaacaccaacgacgccaactcctgccaaataatcatcccccagaaccaggtcaacaggaagtcagacatctacgtgtgcatgatctcctatgcacacaacgtggcggcccagggcaagt

SEQ ID NO: 600 - DNA, 532 bp, Homo sapiens
accatatgggagagagaaagaacctagaaatgggtgtatacatgccattttggtccttctgtgactccttagctatgtgacagttggctaagaagaggggagaccttggagaaagaaactgctgggatacagaaagcagaagagatcatcagggactgaaaacttcctggaaagctactagagttcagatccagccaaatggggaaatgttggcaaacaactgagaaactcagttggaactctaaaaattctcttaggagagatgcagtatcccaggagtgaggcatatgttctaagaggaaaataaaatataattaccataacacagcttaaaactaggtcttgagagcagcaagatgatctgcaagtaattacaaattctgcccagaaaaaaaattcaaaattcttgagtagttctatatcatattatccataaattcagcatactttaaaaaaaataccaaatatacaaaaaagcaagtaaaacagactgataagaaataaatcagttattaaaaacaaactcatagat

SEQ ID NO: 601 - DNA, 211 bp, Homo sapiens
acaggtgccgcgctgtggaagcaactcgcgtgtagaaccagttctcatcgtagggagcaagctctttgtgcttggccagcttgacggtatccacccattcggggactttcagcttcccggactttttgaggaaggctgccagagctctgacgaactcctgctggttcacgtcttttacagtaactccaggcatcgtgcggcctccgcgctg

SEQ ID NO: 602 - DNA, 546 bp, Homo sapiens
acatggacattctgcaaacccagctgtcacatttttcttgcaactccttttgcaaaagcagactaaaatgttttaaaatgtgaaaaaacattattttttcaaagcaagaaaataatttactgccctcttacataatgtatttataaagtttttccagataaactaatcaaataaattagaataatgtgacaacattacaaatttaatttgttagctgcattccttctgatgttaccacgatagaatgttactgatgattcagggctatttctgaagtctgtatgttgctgctgtccccagtgatggtggacttatctttgccttacctgatcacaaattatgttggggaaaataaagatttaatatttctttaaatagaaaaagaatttggttttgctcgtttaagagcaatgagaaaatgatggaatgttgactgtgtttggcacacaggacacggaccttcatggaagtccttgctctgcgtggcatctgtcagcttttcacctttcattcttattcttcacttttgctgctgagcctagctgt

SEQ ID NO: 603 - DNA, 496 bp, Homo sapiens
accctcttcaagaatcggatggatgtcgttttgaagggcgacaatcttcctcagtatagaggggtgaacattcggagattgctcaacggtagcatcgtggtcaagaacgatgtcatcctggaggcagactacactttagagtatgaggaactgtttgaaaacctggcagagattgtaaaggccaagattatgaatgaaactagaacaactcttcttgatcctgattcctgcagaaaggccatactgtgctatagtgaagaggacactttcgtggattcatcggtgactccgggctttgacttccaggagcaatgcacccagaaggctgccgaaggatatacccagttctactatgtggatgtcttggacgggaagctggcctgtgtgaacaagtgcaccaaaggaacgaagtcgcaaatgaactgtaacctgggcacatgtcagctgcaacgcagtggcccccgctgcctgtgcccaaatacgaacacacactggt

SEQ ID NO: 604 - DNA, 587 bp, Homo sapiens
  misc_feature 225: n = A,T,C or G
acaacatgacttaaaacttttttttttctattaaaacttaaaggggaacaaaacttgaaaaagccctgttcttcagaaggtgagtgggttgagggaggcagtaatatgaagtgactgctgtgtattttaactaccagattttttatatttgccactgttaaatagttggaaaggggaaattctgattaagcgaaagtggtatcatcctaggtaagcttatttcanaacaagtctaatatttcagattctttcttttcgactttatactctgagttattacttactgtaagtggtgtatatgaaacctccatgcattttccagtatggatctgctaatatgcacagtaaatccatgtctttgtttgtttttctattaaaaagcaatcaagaaagataatgtgaaaaagaaaggaatttagaggtagggaaaagatgaatgtcagacatttgaagaactatagtaaaatgataaacactaaatatacttgagaaaactttcttaatatgccaatgaggtaggcctgatctttgaaatagtgaataggaatacaatgcatttcctcagtgatcactgattagaatgagtt

SEQ ID NO: 605 - DNA, 411 bp, Homo sapiens
acggtagaactgctattattcatcctatgtgggtaattgaggagtatgctaagattttgcgtagctgggtttggtttaatccacctcaactgcctgctatgatggataagattgagagagtgaggagaaggcttacgtttagtgagggagagatttggtatatgattgagatgggggctagtttttgtcatgtgagaagaagcaggccggatgtcagaggggtgccttgggtaacctctgggactcagaagtgaaagggggctattcctagttttattgctatagccattatgattattaatgatgagtattgattggtagtattggttatggttcattgtccggagagtatattgttgaagaggatagctattagaaggattatggatgcggttgcttgcgtgaggaagt

SEQ ID NO: 606 - DNA, 468 bp, Homo sapiens
acctggagtataagaagagggtgcccacgggcctgcctttcataaagggggtcaaggtggacctgtgacgggcagtggccccggtgaccttggggcctccgaccctgtgcagcctgggacaaaactgtttccggttggccgctgccacatggattttcttaatcgttttatgtcattagtcactcttctggaatgtcactcaagaccaagcggtcagaaggcctgaggacccaaggccccactggagcagtctgtccttatgccgaatcaaggcggaacatgggtgaaagacgagtaaggggcaaatcacagcaatattccacagcgccctccagagttacctggggaggaccgaggccacacgccactgcccccgaggccagagtgtaagtaaaggataaccaggactcgctgggagagatggactctgtcctcagcaacactccacagcagaaaggggtagcaggt

SEQ ID NO: 607 - DNA, 360 bp, Homo sapiens
acttggatgaggaactgatggtcctaagctcaaacagcatgtctctgaccacacgggagccctctcttgccacctgggaagctacctggagtgaagggtccaagtcttcagacagagaaggaacccgagcaggagaagaggagaggagacagccacaagaggaagttgttcatgaggaccaaggaaagaagccgcaggatcagcttgttattgagagagagaggaaatgggagcaacagcttcaggaagagcaagagcaaaagcggcttcaggctgaggctgaggagcagaagcgtcctgcggaggagcagaagcgccaggcagagatagagcgggaaacatcagtcagaatataccagt

SEQ ID NO: 608 - DNA, 265 bp, Homo sapiens
actaagagttctagttaaaatctacatgaacttggagaaacctgatttcatcaatgtttgtcagtgcttaattttcttagatgatcctcaggctgtgagtgatatcttagagaaactggtaaaggaagacaacctcctgatggcatatcagatttgttttgatttgtatgaaagtgctagccagcagtttttgtcatctgtaatccagaatcttcgaactgttggcacccctattgcttctgtgcctggatccactaatacgggt

SEQ ID NO: 609 - DNA, 382 bp, Homo sapiens
  misc_feature 96, 233, 269, 286, 372: n = A,T,C or G
acctagtaaaattgatgaaaagagactgactcctagacacatcttggtgaaattttggaattctagtgataaagagaaaataataagggcttctanagagagaagagaaattacctaccaaggaacaagaatcaggttgacagcagacttatcactggacacactggatgctagaagtaaatggagcaatgtcttcaaagttctgctggaaaaagggctttaaatcctagaantcctatatccagcccaaaaatggcattttgattttnagggggtaaaaacaaanggtattttcttagtatttgagaatttagagattatgttttgcatatgcccaccttgagagaattactggggaataatataccttancactctaggg

SEQ ID NO: 610 - DNA, 123 bp, Homo sapiens
actgaaagactggcctcacttaaactgagccaggagagctgcagatttattaatgggtgtgttagtgtgcagtgccttgcaggaatttaaactctctacccttaaagaaggaaatgtatttgt

SEQ ID NO: 611 - DNA, 428 bp, Homo sapiens
  misc_feature 412: n = A,T,C or G
accaggtcacagcacacctgcggggacgcagttaacatcgaaggtcatagggcaagatggactgtgctcaggaagcttccttgggcagaagtgtggcagaatgggctggagccagcgaggccagcagcgaggaaagccagggagaaggctcaggtattatattccataataaatagggatcgcatgtgaaaaaaggtaatgctaacatcagtgtcaaagtgagaggtgatcaggaaaggaagtggagttgtggtgatgacagtaaggtgaggatgaccgctagagacaccacagaggatactacagagatactacagaaccccacaactaagagatcatgggagcgggggcagggaggaggagctgtgggacagaacaaaggaacggcagacttggggggagggggcgaaangatgggggaggatgca

SEQ ID NO: 612 - DNA, 286 bp, Homo sapiens
  misc_feature 182: n = A,T,C or G
ttttttttttttttttggctctagagggggtgctatagggtaaatacgggccctatttcaaagatttttaggggaattaattctaggacgatgggcatgaaactgtggtttgctccacagatttcagagcattgaccgtagtatacccccggtcgtgtagcggtgaaagtggtttggtttanacgtccgggaattgcatctgtttttaagcctaatgtggggacagctcatgagtgcaagacgtcttgtgatgtaattattatacgaatgggggcttcaatcggga

SEQ ID NO: 613 - DNA, 324 bp, Homo sapiens
actccatctcctgtggggttttcagctggcactcagcacatttgtagaatgacccaggagggctccatggcaactgtgccccgagactccaggcccagccgggtcccgatggcgagagcgttgtggctcagtgaagcactggcacagaaaggctggactcgaggaatcgaggggtgaagatggagtcggctgacattttttgccttaaaaatacattaggagtcataagcgtgatgacacatggagtgtagcttcttgcaccactggatcaacagtcatcaatttcatgactcggataaggtccccaggagcctggcagaatgt

SEQ ID NO: 614 - DNA, 417 bp, Homo sapiens
accaggaagaaacatattgccgagtggatgccgccgcgcagcgtgtttgcttgaggcagaagcttcagcatctgctgggataactggaggaagaaatatgaagccttagcggctttacccgggaagcgagtttcgagatggcggctcagcggatccgagcggccaactccaatggcctccctcgctgcaagtcggaggggaccctgattgacctgagcgaagggttttcagagacgagctttaatgacatcaaagtgccttctcccagtgccttgctcgtagacaaccccacacctttcggaaatgcaaaggaagtgattgcgatcaaggactattgccccaccaacttcaccacactgaagttctccaagggcgaccatctctacgtcttggacacatctggcggtgagtggtggt

SEQ ID NO: 615 - DNA, 591 bp, Homo sapiens
  misc_feature 9, 10, 571: n = A,T,C or G
accgtttannatttcatccacatgcccagataatttttttttaatattttgtaaagatggggattccctatattgtccagaatggtcttgaactcctggctttatgcagtctttccacctcagcctcccaaagttctgggttacaggtgtgagccactgcgccgggccaattttggtttttcatggaggacttttagcaggtctcaaaagttttcttctaatagttttcttggtgttctatcattcgtaggtgttgaatttaccaaactttttctatttcaattattacatttttactttgttcaagtaatattgtatcatattaaatgaacattgcattgtgaaaataccctgcttagtcatggtatgtaatcatccttatacctttttgtattctttttttaaatatttctgagaatttctgtgtctaaatttaaataggatgttgttttgtaatcatcttgtgattcttttgtctcctttgggtattattggctaatagatgaattaagaaatgttacctcttctactgcttgaagtttttgtgagaaattgatgttttttcattaangtgttgatgaaatgtacctc

SEQ ID NO: 616 - DNA, 144 bp, Homo sapiens
  misc_feature 81: n = A,T,C or G
tacctatgggtttatatcctcaaatacgacattctagtcaaagtcttggtaatataaccaatgttttcaaatgtattctgntatacaaagagcagatttttattgaacttgtgcaataactatattaccatacaatataaatat

SEQ ID NO: 617 - DNA, 307 bp, Homo sapiens
acttttacctgtagactatttttactaaggtgctttataatgtgttttaaagcattgcatttacaaaacaaggaaaatgctgtaaatattgcatattttatgtatttggaccaaaaggttacaagtaattagacaaaagtggttttgcaccaattttatgtcaagtaaaaccatcagacctactgttcttgtatttctcatttaactttactgttaagacatcactgaaatgaacttcagtaagctttcaattttgatacacagttcattattcataacttgaggcagtaattacagtggaatgagt

SEQ ID NO: 618 - DNA, 550 bp, Homo sapiens
acacggggcccagactcttgcctggtgccacgtcctccctccagcctgtaatcagaagcccttgtaaaccctcccttgcagtgagggctgaaaactccgatctgcctttgttccatgacaaaggagagattatcacgtgccctactggactgtgcatttcgtggcttgaaaaatcagtggtgaatgatgccactcagacgctgggacactgggagaaccttggttcttggccacagcactgagcttggcgaccagtgaggctgctgctggtgaaacttaacaccataacctctcgttgtcttttgtgaaatcgttccgacttcatggtgttttcttgaagtcattctgccttaaaggaaaaactcattttctttttcaatttaacacaaatattgtggccattttttagaagagttactatttcaaatttcaagggagaagataagactgcatttcccccttaaggaaaaggctaagttaccaaggctgtattaaattgagtatgtgaaagttacctagcaaatccaggatagacagtgacccaatgaat

SEQ ID NO: 619 - DNA, 355 bp, Homo sapiens
acataattgattaaaatctcttgattataaatgtttggaaaggttctaaggggacctacagacagacatacatagacatttcaaaattaatagcttttgattagtataatatttcttaatttggataataaaaattgtagctttttattaagccaggaaacatgaagcataatttgtttaaaattctctttggtcattgagggaccaaaaaaggacgtaaaatttacagtcaatctatgagggtttttttccctccataagtttaactttaaaactgtatttaaggaatcaaatcttacaaaatcctggaagattttggtaatgatgttgataatttcagggaaattaatcaagt

SEQ ID NO: 620 - DNA, 484 bp, Homo sapiens
  misc_feature 458: n = A,T,C or G
accttggaacccagtttattcttgtgctaagcagaactgtaaaatagttaaaatgtcttatcaagtaattcgccgattacaaagacaccatttgttttttatttcattctttgttttaactcatgtggtagtgatatttaatactttctgatcaaacaggttcaaagtaaaacgttaaatttcacatttcttttaaagaactcttaaagtgtaacagttacgccatacttcataagtggtaaagaaaggtataaaatttggaaacattttgttgggcatagtagtgattgggtgaaaaggataaattatatcaaaatgagaatgtgctgtaattggaagtagggagctaaaggatgtttctttcagtttagtagaactggaacgttttactattaaacatggcttttataaatgcatggtccaataattttattcactgttagtatttaattcactgncagcttattaatgttttctgtacctc

SEQ ID NO: 621 - DNA, 447 bp, Homo sapiens
acacttgtttatggaactttctgtggccacctacgaaagacaagttaacaaactgtcatggaggctgttgttgcccagccagggccgctgcattttgacaacatttccaccctggccactcagcacatttcatggaggtcatgtcttttcactgatacttttttgatagtttttatataacaaaatccttattctatttataacttaagatgataaggcactataaattaatgacctaaaataatatatttgtctgttatcttttgctatttctacttcactttaatttttagctgtaaaattggtaaatggattcttacaactatctctttccatttcttactatttggttttcaaatttcatttaaatgtcagaatttccttttttaggaacaatgtgtatttcattgcactatttaaaaataaactcaaatttgcatgccaaaa

SEQ ID NO: 622 - DNA, 554 bp, Homo sapiens
  misc_feature 487: n = A,T,C or G
actctgaggcttgtaggagggtaaaatagagacccagtaaaattgtaataagcagtgcttgaattatttggtttcggttgttttctattagactatggtgagctcaggtgattgatactcctgatgcgagtaatacggatgtgtttaggagtgggacttctaggggatttagcggggtgatgcctgttgggggccagtgccctcctagttggggggtaggggctaggctggagtggtaaaaggctcagaaaaatcctgcgaagaaaaaaacttctgaggtaataaataggattatcccgtatcgaaggcctttttggacaggtggtgtgtggtggccttggtatgtgctttctcgtgttacatcgcgccatcattggtatatggttagtgtgttggttagcaggcctagtatgaggagcgttatggagtggaagtgaaatcacatggctaggccggaggtaataaataggattatcccgtatcgaangcctttttggacaggtggtgtgtggtggccttggtatgtgctttctcgtgttacatcgcgccatcat

SEQ ID NO: 623 - DNA, 305 bp, Homo sapiens
acaacaccgggaatattgccagagttaacctgaccaccaacacgattgctgtgactcaaactctccctaatgctgcctataataaccgcttttcatatgctaatgttgcttggcaagatattgactttgctgtggatgagaatggattgtgggttatttattcaactgaagccagcactggtaacatggtgattagtaaactcaatgacaccacacttcaggtgctaaacacttggtataccaagcagtataaaccatctgcttctaacgccttcatggtatgtggggttctgtatgccacccgt

SEQ ID NO: 624 - DNA, 544 bp, Homo sapiens
acaaacccaggcctgggcctaggaaagggcagaagaaaggcaaagggtcccttggagcaggaacccatccctctctgcttatacccagcacccctcatcccaggttcctttcttcaacctccgcctgcctctgggaacacagagcaccaagaactaacaaaccgggaccctccagggccacagcgtggggcagagtccaggcttctgtctccccgcagtgggagatctggggagctcagtgaacctcctcaccctcctgccagtatgaagttgggaagcgccttctctgtcccccagaacagaacaaactcttgttctctgtggttggggaaaaggtgtggggggcttggacctaggaagaagctgagctgaattcctccagggcccaggtgaaacccccaggggagtttctgagactctagacttgccatttctccacttttccttcccaatgactccggtgagcagctcagagtctgggctagggcaactggtaggacagtggggatctgccccagagacatctgtgggtttcagatacctc

SEQ ID NO: 625 - DNA, 619 bp, Homo sapiens
acttatatttaatttgatttaatggttactgcccagatattgagaaatggttcaaatattgagtgtgtttcaatatattatctggcttatttcagcatgagtaatatgagcaaaataagttaaaacctgcgtctgatcaattttcctcatgactagaactaaaacagtaaatttggacaatattaagcctcaaataatcatctccaaactccttctaacactttttaaatcagattggaagacatggacaaatcaggttcatgtgttgcatctttatgtcctttgccaatatccaagatcatcacatatggtagatattcacatggagtttcaaattcagaatagattaccattaccttcctgcccttacacatcctactccttatttaaaagttctatttgtgacttttcatttcctgaaagtttaaaaatacaatttgagaatgtttataatacattctctcctgtcttttcacggttacgtctgttattgctgaaatacaccacattttctttgttctggtcaaggttaactcaatatctgtgtgaaagagaactactaacaacgttacaatagaggctagatttgaaaaaaaaatctatagatctaattgataca

SEQ ID NO: 626 - DNA, 195 bp, Homo sapiens
accattggtggccaattgatttgatggtaagggagggatcgttgacctcgtctgttatgtaaaggatgcgtagggatgggagggcgatgaggactaggatgatggcgggcaggatagttcagacggtttctatttcctgagcgtccgagatgttagtattagttagttttgttgtgagtgttaggaaaagggcgt

SEQ ID NO: 627 - DNA, 197 bp, Homo sapiens
  misc_feature 122, 173, 174, 176, 185, 186: n = A,T,C or G
accattggtggccaattgatttgatggtaagggagggatcgctgacctcgtctgttatgtaaaggatgcgtagggatgggagggcgatgaggactaggatgatggcgggcaggatagttcanacggtttctatttcctgagcgtctgagatgttagtattagttagttttgtnngngagtgttanngaaaagggcgt

SEQ ID NO: 628 - DNA, 208 bp, Homo sapiens
acttttgttttgttttaaattaagagattcccaaatgcctttttccccctcatcttgaaatgagatgagtttttatgtgtaagcaatatttatttaactattctataaaattattgagtgcctactgaggcctttaagcaccgctaacattcctttccatcattcttttaaatgacataaaataattgtgcaatgttcctgatgatgt

SEQ ID NO: 629 - DNA, 207 bp, Homo sapiens
actaagtgaagaagtcagaggacagaggaatttctctttctaggagattttcattttgtgtgactcccatggggaggaacagactggcaggaagtacaccggggttaacactggttgacttgaataggattattcgatttttaaaaatacttttccatgttttctgagtgctctatgataaatcagttgcatctgtgataatacagt

SEQ ID NO: 630 - DNA, 442 bp, Homo sapiens
accatcacacaggaggagggagctaatccagtaacatacattcaaagattaaattgcagatatgcacagtgtatttggcactgttcattaatattataacaccttcctctcaaagacaggcattcttaagcgttagtcacgatataccagaatttgctattcacattaaaaccaccttttaaactttataacagtaaccgattattatagttttaagaaacaaaacacaatgagaactgggaatggaattcaaatcctccaacttcttgctatgctccaagctgccatccataaaacaggtttaattcggtaatttttccattgtggggagtgtcaacaagaaacaatttaaagacagtattttccaatacaaataaagacacatacttttgtttaaaattaccagttcttcttgggagtgcaaagggagccttgatgatgt

SEQ ID NO: 631 - DNA, 516 bp, Homo sapiens
  misc_feature 401, 504: n = A,T,C or G
accacttaattactggcactgagtatcactgaatttcttagttttctagtggggaaacattattgagaagccctcccttattttaagtaagttgattaaatcttatgtgagttgccagttgtaatttttcaaaggaaaaattttgatggggtggaggaatgaattgccagataatctttctggaattccgagagaattccaaagagggttttttttttttttttttttaggacatcttttgatacctttaaaagaaccactgtcaagtaatccttaaaagaatatcttggaaaaggaaacagattttttcctgtgtgtaagcaataagtgaagttacatttgccctaaccctagggatgattctttacccagttttaaagcccatcatggtattctaaggngttgacaccctccatcctcagagcaggtcgaaaatattaaatagactggggactctatgatgggcagcctgtgctttttgacttcagtttgctatttttctgngatcacattagt

SEQ ID NO: 632 - DNA, 201 bp, Homo sapiens
actaaaattttaacctgtgttctaagtagaaactgatttaacccaagtaatgcagctttgattgatttcagcattcgttgctttgctatttttacaaaacagcattgattgaagcaagtcttggttttactaaggtagggtagcatttgctattggtaaagagaataaatacacttaatttcacaatacattgttatatgt

SEQ ID NO: 633 - DNA, 536 bp, Homo sapiens
ataaaaccattttctgtaatcaaatgattggtgtcattttcccatttgccaatgtagtctcacttaaaaaaaaaaaaagaaaaagaaatggataatttcatctactgcctttacttggggttaatgtgattcttaaacaccttcatcatggaactctcagagtggggtccgttttggtttcctggtggtgggttttgaaagataagggaaagcacattttgagcatgtctgggtaccatggtgcggatgcttgggaaccagaactgtttcagaggaatctgaagtctgattttagttttcagagacacagcttgttgtaaaacatgagaagacatgatttctaggactcaagcagcaagccaggattctaggttggccgctgtgtcatccttgaagtcaagacaaagctgggctcgaccttcaagggtcctcgttttgataatacttcagaatagggaactcatgtgaatactactatgtagaaataaaacctagaccttgagcgaacatctgtatattggttgaaaacgatagtg

SEQ ID NO: 634 - DNA, 91 bp, Homo sapiens
acaggactaggaagcagataaggaaaatgattatgagggcgtgatcatgaaaggtgataagctcttctatgataggggaagtagcgtcttg

SEQ ID NO: 635 - DNA, 235 bp, Homo sapiens
accttgttgaaaccccggccgtgtagaacaggcctggccctctgccagggtaatatgggagacagacgtcctcggtgagcttggttgtaaaggcatctgctgcagctcaggaagcaatgaagagccgagacccaaggcctcatccacttccaggagggctccctttatgggctcttggcgactgtaacactgtttagcacagaaactagcacagaaatattacagatgatttggt

SEQ ID NO: 636 - DNA, 249 bp, Homo sapiens
acaggctgtcaaccaaagaggtcggagtccccggtctccctcaggccatcctcatgtcagaaggcctcgttctagatcaagggacagtggagacgaaaatgaaccaattcaggagcgattcttcagacctcacttcttgcaggctcctggagatctgactgttcaagaaggaaaactctgcagaatggactgcaaagtcagtgggttaccaaccccagatctaagctggcaactagatggaaagcccgt

SEQ ID NO: 637 - DNA, 288 bp, Homo sapiens
  misc_feature 182: n = A,T,C or G
ttttttttttttttttggctctagagggggtgctatagggtaaatacgggccctatttcaaagatttttaggggaattaattctaggacgatgggcatgaaactgtggtttgctccacagatttcagagcattgaccgtagtatacccccggtcgtgtagcggtgaaagtggtttggtttanacgtccgggaattgcatctgtttttaagcctaatgtggggacagctcatgagtgcaagacgtcttgtgatgtaattattatacgaatgggggcttcaatcgggagt

SEQ ID NO: 638 - DNA, 629 bp, Homo sapiens
cgagcggccgcccggcaggtacaatttaatttttctgcttgcccaagaaacaaagcttctgtggaaccatggaagaagatgaaaatgagactggcaaagaacaaatgctgaatctgaagaagatttgggcaaataatctgcatacttttaattgggaataagatggaaaatatgaatgctaaatcaaattttttaaaaaatacaccacacgatacaactcaatacaggagtatttcttctcaaattcttctagcaccatcaacattcttcaagtatctgaaatactattaattagcacctttgtattatgaacaaaacaaaacaaggacctcagttcatctctgtctaggtcagcacctaacaatgtggatcacactcatgggaaagtgttttgaggtagtttaaacctttggaagtttgggttttaaacttccctctgtggaagatattcaaaagccacaagtggtgcaaatgtttatggtttttatttttcaatttttattttggttttcttacaaaggttgacattttccataacaggtgtaagagtgttgaaaaaaaaattcaaatttttgggggagcgggggaaggaagttaatgaaactgtattgcacaatgctctgatcaat

SEQ ID NO: 639 - DNA, 161 bp, Homo sapiens
  misc_feature 32, 54, 55, 56: n = A,T,C or G
actaagtcacacccagccagtcaataacatgngaaatcaaaataaaataataannncaaagaattacataaatacagggccttttgagatttttggcaattgtaaacaaaaacgaatggtttttacaattcagtgtaattctacgaatatttatttggcac

SEQ ID NO: 640 - DNA, 225 bp, Homo sapiens
acagcaatgtggagccccggggctgtgcagtccagcactgctgtccggctcagcagatccggaaaggggaggatactgttgaagagcaacaaccactcaccctgttggggagaaaggtgctgggaggggaagtccaggcctccttgtgccagctaccaggagggacactcacctcatcatgtagcagtgagaagtccagactgctcacaggaggaaaagtggggt

SEQ ID NO: 641 - DNA, 526 bp, Homo sapiens
actgtgcaggtgggttagaggctgcgtggcaggagaggttcagattttcccctgatctgtaagatgtgtttagaggggaaatggtgggggcatccgggccatagaggacattcaggatgactgaatcactgcgcctggcactcactgggttctgggtttcacatttgtagcttgctgtgtcatttcttgtgacattgaatagagtgagggtcctgttgccattggacagctgcagcctgggactgaccgggaggctctgattgtttacccaccacaggtaggttgcgtcctgagtctcaggttcacaggtgaaggccacagcatccttgtcctccacgggtttggagttgttgctggagatggagggcttgggcagctccgggtatacccggaactggccagttgcttcttcattcacaagatctgactttatgacgtgtagggtgtagaatcctgtgtcattctggatgatgttctggatcagcagggatgcattggggtatattatctctcgaccactgtatgc

SEQ ID NO: 642 - DNA, 555 bp, Homo sapiens
accgcggccgttaaacatgtgtcactgggcaggcggtgcctctaatactggtgatgctagaggtgatgtttttggtaaacaggcggggtaagatttgccgagttccttttactttttttaaccattccttatgagcatgcctgtgttgggttgacagtgagggtaataatgacttgttggttgattgtagatattgggctgttaattgtcagttcagtgttttaatctgacgcaggcttatgcggaggagaatgttttcatgttacttatactaacattagttcttctatagggtgatagattggtccaattgggtgtgaggagttcagttatatgtttgggattttttaggtagtgggtgttgagcttgaacgctttcttaattggtggctgcttttaggcctactatgggtgttaaattttttactctctctacaaggttttttcctagtgtccaaagagctgttcctctttggactaacagttaaatttacaaggggatttagagggttctgtgggcaaatttaaagttgaactaagattctatcttggaca

SEQ ID NO: 643 - DNA, 153 bp, Homo sapiens
acactagcaagtatctgtgaatccttagcactggcgggttaacagaaatgctttggtaatacctacttagttaattggaggaagtagtaaataaacattaggtaatctgcagattacttcaaatgggaaaaatctttttgtagactctatagt

SEQ ID NO: 644 - DNA, 320 bp, Homo sapiens
actaagcaaacaagcaataaaaaggggaatggggtgtgctagtgtttgaatatgctctcttgttgctctaattctgtgcctctgtgcattaatatttggatgcatgcaatgccagcatggaaattggtcttcacacatactgcagttttccagaaacattcacaaaccaataaatgtaacagacattccatttgttaatgggcatatatgtgaaaagcagtgtagaaaataggctaatattagaaaatggttaagtcctaaataacttcaagtgtggttatataatggacactgtcaatgttcataacttaaacctgggt

SEQ ID NO: 645 - DNA, 345 bp, Homo sapiens
acaaaatccatcaggcatcttgcaggaatgtgtgcagtcagctcccgggaagaactgacggctccctgaattcttgggctggatttggtgagcactaaaaggaaccggattcgttaaacgctggtagaagtgttttccaatggctgcaacggttggtcaacctaacttacgtaagtttacaaccgaaaaaaaaatccacaatggaaatatagcaggtcgatacagccgggggcggctaggaaagagggaaaagtgaaaggtgagattacgagagtctattaagtgtctgggatataaagacagcgccagggaaaggggaagtcgcttctgagcctttcgggcagt

SEQ ID NO: 646 - DNA, 383 bp, Homo sapiens
acctgcaatatatttggagtattatgtctttattgttgttaaaaagtttttattgaatgtatgaaaattatcaaattgtattcatcattattaacatgtcctggggaaggaagggaaactttctaggacagaagtcactttcagatgtcatgtatgtattgggtgttcaatcatatctaacactgttttgatttttgtgggaaaatattccaggaaacgctaattctctttagactccttgttcttttatgactacaatgaacatatgtctatgtgatagctaaagatatttttgaattgtatgtgtgcttaattatcggtaagtataaatatttgagaaaacacatggtctggatatttaaaaccctcataaacatgttggt

SEQ ID NO: 647 - DNA, 379 bp, Homo sapiens
acctgctgaatctaaaataaaataatatacactaaaatgttaaaattgattttagtagaataaaaggtgactgaatattttaaaaagttatgcctagatgaatactttatgattttacattgcagcattttttgaacatggcagcagctactatgaattgtctatccaactgccactccagcttcctccctactaacaaaaccccagctcaagggcaagtgtgctcagtgccaggggatacactagtcgacccatccccctttgccagggcctggtccaagagtgggcacgtggccccactctataaagagacaggggggaggttgctggagctgctgacggttattcccggataagggcagaatgagaaggctcctgt

SEQ ID NO: 648 - DNA, 451 bp, Homo sapiens
  misc_feature 4, 5, 276, 342, 391: n = A,T,C or G
cctnngttcctctgggggttgagaataagaatagtggggagggaaaaactcctccttgaagatttcctgtctcagagtcccagagaggtagaaaggaggaatttctgctggactttatctgggcagaggaaggatggaatgaaggtagaaaaggcagaattacagctgagcggggacaacaaagagttcttctctgggaaaagttttgtcttagagcaaggatggaaaatggggacaacaaaggaaaagcaaagtgtgacccttgggtttggacangccccagaggcccagctccccagtataagccatacaggccagggacccacaggagagtggattagngcacaagtctggcctcactgagtgggcaagagctgatgggcctcatcangggtgacattcaccccagggcaggcctgaccactcttggcccctcaggcattatcccatt

SEQ ID NO: 649 - DNA, 165 bp, Homo sapiens
accatgctgtccatagctgtcgctgaaagtgtcctttgggggtatgagccagctcttccagcaacagcaggcaaaggtgggggaaaataagtagtgctggagggctcaaaatggtcagctgttagaatgtgcaagcacttggggacagcatgagcttgctgttgt

SEQ ID NO: 650 - DNA, 358 bp, Homo sapiens
acccgggctccacattcatggatcatgtgttacgctatcaggacactccaggagtcaaaatgattgtggttcttggagagattgggggcactgaggaatataagatttgccggggcatcaaggagggccgcctcactaagcccatcgtctgctggtgcatcgggacgtgtgccaccatgttctcctctgaggtccagtttggccatgctggagcttgtgccaaccaggcttctgaagctgcagtagccaagaaccaggctttgaaggaagcaggagtgtttgtgccccggagctttgatgagcttggagagatcatccagtctgtatacgaagatctcgtggccaatggagtcattgt

SEQ ID NO: 651 - DNA, 180 bp, Homo sapiens
accctaaccgtgcaaaggtagcataatcacttgttccttaattagggacctgtatgaatggctccacgagggttcagctgtctcttacttttaaccagtgaaattgacctgcccgtgaagaggcgggcatgacacagcaagacgagaagaccctatggagctttaatttattaatgcagg

SEQ ID NO: 652 - DNA, 246 bp, Homo sapiens
gccctacaaagaaaatggagagcctcttctggtggatgctttgctccctctgagctgcccatgctggtctggcaaacacacctttctgctttgccttcacaaaagtaatgtgttccctttcccaccccttgcctgaccctcagggagtcagcctgcttccatccatgggtgggaagacttcagcacaaaggaaagactaattcttgtcaggcatttttgaaaaggctgattatgtgtatcaaggta

SEQ ID NO: 653 - DNA, 573 bp, Homo sapiens
aggtacgtagtctaggccatatgtgttggagattgagactagtagggctaggcccaccgctgcttcgcaggcggcaaagactagtatggcaataggcacaatattggctaagagggagtgggtgttgagggttatgagagtagctataatgaacagcgatagtattattccttctaggcatagtagggaggatatgaggtgtgagcgatatactagtattcctagaagtgagatggtaaatgctagtataatatttatgactactaaattaataaatttattccacttttgaaatgacagccaaaaatccacctaattgattctcatttggcacgttcttctcaattctgttcactaaattaaaattactaaatttaaactgccaagagccatgatgttgtctgcacaagacaacattttccatcactttcagaaagttatatttggcatgttaaggaaaaaaaatataatcccacagcagcagctatttaaaataagacagccacaggattcatgcagaatatttttaaatattcctgttgaacacaatgatttaattgattttttcttcac

SEQ ID NO: 654 - DNA, 474 bp, Homo sapiens
gttttcctgagcagaagcaaagcctcaaaatacatgcacaccaggtaggattattgttaatgaaaagtataatttcagtgtctttacaacttagtttgtgtctaaaatatgaactagtgtttttttccacttgttaaattgatcttgtatttggttttgcgaattttcaaacaaagaataaagaacatgaaattagactatatattctgtcattttcccctgagttttttctaatcttgtcccttcatacttttccccaaaggctcagcgtcttccatttctttcaagctcaaatctttcactggatgttttgaggggtaatgatgagactattggatttgaggatattcttaatgatccatcacaaagcgaagtcatgggagagccacacttgatggtggaatataaacttggtttactgtaatagtgtgctgttcatggaaaccgagggctgcatttttttcaggtgtcagt

SEQ ID NO: 655 - DNA, 603 bp, Homo sapiens
actgaatttctgtcagttaaggggttcactgctttggtggaaattggtggaaattgctagcaggttccacgatgtttatttttttctccatgttgtatatcattaccatttcacatacgcgtttctatttttcttcctctcctcctgatctccttaaaaatgaatctagagttggtggctttttccccctcctctttggccagttccacagttcagttcttcctgaaaacagggatgatgaacttgtaggatcaggacaaatgtgtgtttttcaaaaacttaaggctgggtgtgaaacaccttctgtggacaaggatttgtaaacttctctcctccctccagctgcggccccagcctaactgatagttacttgattcagtgtgctagacacttaaatagcatctatgtctctttcaagggaatttgtcaaataatgctgtttagctaattgttgcaagcaattgcatattaacagctgtgattttgttggacagcaagtattatggccaaagccagtttcttggcatttcaaaaataatgcaataaaaaactagttgaggttagctgaggctggaaatgccttttcatggtaaatgattcact

SEQ ID NO: 656 - DNA, 361 bp, Homo sapiens
acctactgttcagtcttcacgccatagtgaagcttggaatccctcagaacactattttggtgcagactttgctgagggtgacccaggaacgtatcaatgagtgtgatgagatatgcctttcagttttgtcaactgttttagaggcaatggaaccatgcaagaatgttcatgttctacgaacgggattcagaatactagttgatcagcaagtttggaaaatagaagatgtcttcacattacaagttgtgatgaagtgtattggaaaagatgcaccgattgctcttaagaggaaactggagatgaaagccttgagggaattagacagattttctgttttgaatagccaacacatgtttgaagt

SEQ ID NO: 657 - DNA, 264 bp, Homo sapiens
  misc_feature 13, 23, 41: n = A,T,C or G
tacctgatctctntaggtatggngctgggtgcagatgcagngtggctctggatagcaccttatggacagttgtgtccccaaggaaggatgagaatagctactgaagtaagttgaaaattccctctcaaaaaggtttaaagccattggatgtgccacaatgatgacagtttatttgctactcttgagtgctagaatgatgaggatcttaaccaccattatcttaactgaggcacccaaaatggtgagttggggaacatagagagt

SEQ ID NO: 658 - DNA, 232 bp, Homo sapiens
accatcaaataatctggtgaatggcatgtgagaataaagcaaaagtgtattaagatttactgatgactggcattcatggtatctgaccagaagaagtaaagggaagcacgaaccaatgtgtttgcagggctcttctgggaagaacagctcttggttttgccctggtccctgacaatgacagactggcaggctgtttcttgcacagctctaggcaagccattaatctgtcagt

SEQ ID NO: 659 - DNA, 638 bp, Homo sapiens
  misc_feature 507, 602: n = A,T,C or G
acattgtagccctctgcctctctacccttaacagctgcatcgacccctttgtctattactttgtttcacatgatttcagggatcatgcaaagaacgctctcctttgccgaagtgtccgcactgtaaagcagatgcaagtatccctcacctcaaagaaacactccaggaaatccagctcttactcttcaagttcaaccactgttaagacctcctattgagttttccaggtcctcagatgggaattgcacagtaggatgtggaacctgtttaatgttatgaggacgtgtctgttatttcctaatcaaaaaggtctcaccacataccatgtggatgcagcacctctcaggattgctaggagctcccctgtttgcatgagaaaagtagtcccccaaattaacatcagtgtctgtttcagaatctctctactcagatgaccccagaaactgaaccaacagaagcagacttttcagaagatggtgaagacagaaacccagtaacttgcaaaangtagacttggtgtgaagactcacttctcagctgaaattatatatatacacatatatatattttacatctgggatcatgatagacttgttaggctncaaggcccctcagagatgatcagtccaactgaacga

SEQ ID NO: 660 - DNA, 502 bp, Homo sapiens
  misc_feature 269: n = A,T,C or G
acctgtgggtttattatctatgggtttatatcctcaaatacgacattctagtcaaagtcttggtaatataaccaatgttttcaaatgtattctgtcatacaaagagcagatttttattgaacttgtgcaataactatattaccatacaatataaatattcatgaatagtttcccaagtctggagcgaccacatagggagaaaatgtaaatgtctcaatttttgttcacaaaagtatattttatcaaattgctgtaagctgtggatagcnttaaaagaaaaaaagtttcctgaaatctgggaaacaagacatttaaagaatcagcaaaatttcaaataaaaaattatgaaaatattatcctcattagttcatttagtcccatgaaattaattattttctctgcttgatcttggtggacagtttcatgaagctgtcagttagttcattaaagttttggaaattctcagacagtgcagtggtatcagaaacttgtattcaagagt

SEQ ID NO: 661 - DNA, 112 bp, Homo sapiens
actttagtcataatcgtgaagctggctaggtttccagtaaatatcagcattttatatgggcaaaagcagttaataaaaatcagttcatttactgtaagccaaatgtgcttgt

SEQ ID NO: 662 - DNA, 530 bp, Homo sapiens
  misc_feature 9, 422, 475, 495, 508: n = A,T,C or G
actgccggntaacgctgtcgtttccattgagcctgaactgatgggtgaggtcgtagattctccaagaagaactgaggttgtggagcgggcaggtaggactattgttcccgttgcgtcttggctgctgtgggatgctgttgattcctcactacggcctgaggttgtggagctgtcagggaagtgtgttgttgcagttgagcccgggctgctgtggtagctggtaggttcttcaacaagggcagatgtggtgctaggagctgaagatattgtgtgtgttgtgctgctgtgggaagttgttgattcttcaccacggcctgaagttgtgtcgctttcagggaagtgcattgtttgagttgaggcccgggctgcctgtggtaggtcgtagattcttcaacgaggcctgaggttgtggaggtgggcangcgagggtgttgttgcagttgcaactgggctgctgtggactgttgtccgattncctcactacggcccaaaggntgtggagctggcngaaaaagtgggttgttggagtt

SEQ ID NO: 663 - DNA, 255 bp, Homo sapiens
accttcaatgtcattaaccataaatgagcatttacaatctggattaaatgtcacatggtattaagtctacacttagagtaatgcttttactgatttttaaaaatatgtgcatatgtttagtgatcgagaaaagtgaaatactggagtactctgggtgcaataaataatatgtagaaatttaagtcctccaattccagcatatccagtgagttttgacagtgtgtttatgtggaatgtttaaggatatacaattgt

SEQ ID NO: 664 - DNA, 496 bp, Homo sapiens; identical to SEQ ID NO: 302

SEQ ID NO: 665 - DNA, 292 bp, Homo sapiens
  misc_feature 28, 124, 131, 253: n = A,T,C or G
ttttttttttttttttttttttctctanagggggtgctatagggtaaatacgggccctatttcaaagatttttaggggaattaattctaggacgatgggcatgaaactgtggtttgctccacanatttcanagcattgaccgtagtatacccccggtcgtgtagcggtgaaagtggtttggtttaaacgtccgggaattgcatctgtttttaagcctaatgtggggacagctcatgagtgcaagacgtcttgngatgtaattattatacgaatgggggcttcaatcgggagt

SEQ ID NO: 666 - DNA, 250 bp, Homo sapiens
acttggatgaggaactgatggtcctaagctcaaacagcatgtctctgaccacacgggagccctctcttgccacctgggaagctacctggagtgaagggtccaagtcttcagacagagaaggaacccgagcaggagaagaggagaggagacagccacaagaggaagttgttcatgaggaccaaggaaagaagccgcaggatcagcttgttattgagagagagaggaaatgggagcaacagcttcaggaaga

SEQ ID NO: 667 - DNA, 259 bp, Homo sapiens
  misc_feature 233: n = A,T,C or G
ccgctctccagcccgcttgaacgctccccgcagccaccgccacccattggaatggccaacaggggacctgcatatggcctgagccgggaggtgcagcagaagattgagaaacaatatgatgcagatctggagcagatcctgatccagtggatcaccacccagtgccgaaaggatgtgggccggccccagcctggacgcgagaacttccagaactggctcaaggatggcacggngctatgtgagctcattaatgcactgt

SEQ ID NO: 668 - DNA, 248 bp, Homo sapiens
actgatgaaagttattaacacgtttcgaaaaataactttactatctgacgtgttgcttctgccgaggatgaccgttattcctgtttttgcatgtatatttcacgtatggttaaatgtgccagcgttgtggtttaaaactaatagtaataatatgcttctttgttcagttggctagagatttactacatccgtccttggaagaggaaaagaaaaaacataaaaagaaacgcctaggtactgcggcaagt

SEQ ID NO: 669 - DNA, 430 bp, Homo sapiens
  misc_feature 16, 289, 346, 350, 378: n = A,T,C or G
acctgcaaattcttancaatacctttaccaccagattagaacagtaagcataataaccaatttcttaataagtaatgtcttacaaataaaaacacatttaaaatagctttaaatgcattcttcacaagtaattcagcatatatttttatatcatgtttacttatgcttaagaattaaagcaagtatatttattactctgatggaaatatgggaaatctctcattcatgcaatatacagggataatattcaagcgaaggggaaattcccgctttttatttttgtaaatgnatccatatataatcatcgacatgacagatgaggaaacccatgaagtttcccaactantcanatatacattttcacttcatcaggaagcnccctgatatctacagctaatttataattagatactgtttcaatgaaaccaaa

SEQ ID NO: 670 - DNA, 435 bp, Homo sapiens
  misc_feature 420: n = A,T,C or G
caggtactctgaggcttgtaggagggtaaaatagagacccagtaaaattgtaataagcagtgcttgaattatttggtttcggttgttttctattagactatggtgagctcaggtgattgatactcctgatgcgagtaatacgggtgtgtttaggagtgggacttctaggggatttagcggggtgatgcctgttgggggccagtgccctcctagttggggggtaggggctaggctggagtggtaaaaggctcagaaaaatcctgcgaagaaaaaaacttctgaggtaataaataggattatcccgtatcgaaggcctttttggacaggtggtgtgtggtggccttggtatgtgctttctcgtgttacatcgcgccatcattggtatatggttagtgtgttggttagcaggcctagtatgangagcgttatggagtg

SEQ ID NO: 671 - DNA, 379 bp, Homo sapiens
  misc_feature 20, 21: n = A,T,C or G
acctcaggtgccaggcatgnngttctccgctgtctggagtcttgctttgggagtgctacacctgtgggagtgccccaggcaccacccaaaggcggggctctggctcaagcttgcatggtttacagagcctcacatgatgtcctttcaggtttgttgagttggggctagggactcggtggcagcagagcctggttctcctgcctgaccaggccttggcaggacgcctcttcccttctgtggagaagatggagaagcagagaagcaggatacagagcaggctggaaaggactagaagcctcatggtgagaaggcagattttcacgtcctgggaagggagctgtgctgcagaagtcctcccttggggccaccttggacattt

SEQ ID NO: 672 - DNA, 546 bp, Homo sapiens
actgtttactaattcaaagaacactatattcattcatatcaattttattcattaattatgaacaataaaatataatattccatgcttttcatgaaatagtggtttcttcttccagtctaatcagggaactaataaatgcttagttcatgggaaaacttccatttgatttacattgacttaattacttcttagggtctagcctcatccatggagaaaaagcactttttcttgaggcaacagcaaattaacagcactgatacaaaatatggcaaattcaatggttgtagcattgctttaggaattttgagactataaataaaactataaccataaataaaagggcttattaatatcttcttttcaggagagtgatacattctgaagttttcttgttattctgttgaatagcaaggacttccaaacttaaatgtcttaaggctgaaaattagttatattcctcaaattttagccttattaatgaaattccaaaagtattataaaataagattcaatttgtcttgaaattataaatttgtaacagatatt

SEQ ID NO: 673 - DNA, 497 bp, Homo sapiens
  misc_feature 17, 420: n = A,T,C or G
cacgaggaactcatgcnaaggaggggactttcggaaatccaaacttagagtgccttgtatttagaatccggaaggaaaaggaaatgaaatgtgaagaaactcatgcaccaaactcgaactggtaagaagactgttagaatgccctcggtaacacagaggctgagagatcctgacataaatccttgtttgtcggaatctgatgcttccaccagatgtctggatgaaaataactatgacagggaaaggtgttccacttacttcttgaggtacaaaaactgccggagattctggccgtgaaagatccttgagagctcttgttagctgcctcgtcgtcctctaagctataagaatgcagttttaatatagaattctatcgtgatgcagagaagaaagaacggagtgaagccatttatgcctacngcagcagaaagagatgaaatcttgagagcagtgggaaatatgccctatttgaatgtttgcattaaaagtgtttatat

SEQ ID NO: 674 - DNA, 550 bp, Homo sapiens
  misc_feature 150, 199, 200, 475, 524, 533: n = A,T,C or G
acaaagtaatgaccataataccttgtctaaatcagtagcagggcttcatggctaggaaacttttttaaacagtaaaatgtcattaggatagatcactctctcaccaacattaaatgtggcagaattaaccaaaaaaaaaaaaaaaaaaangaaaaaaagatttacacgtagatatagcagtaacagaaaattacaaggnngagaacacaaaagaatcaagacaacgctataggttcaacagtattccatgaggctagaaaaccggttaactttgaaagccctagcaaaatatcactctttgtttataaatcacttatttatcatatgaccacacgttgaatccttgtctttccacatactgaagaatcctacattcagcctttaagcattctgcatttctttgccaatcttgtagctgagtatcttgttccagtcgattttggtgcgggtaactggaagctgccgggcgcaaggnccttgaatgtggtatctgacattgtttgatagttttcactaattgctgnctgatactnattttctgcattctcta

SEQ ID NO: 675 - DNA, 162 bp, Homo sapiens
  misc_feature 13, 64: n = A,T,C or G
actttccacagtnaaatttacattaatggcaatttttgatagttttatggctttttactgttanactaatcaaaaataactttaaaaggaacaaagaaactccaacatttcacattatgcatagttatgtagccatttcacagtttctttaagatgtgtaaa

SEQ ID NO: 676 - DNA, 349 bp, Homo sapiens
acttatgttgaggaaatcacagaccttcctatcaaacttcgattaattgatactctacgaatggttaccgaaggcaagatttatgttgaaattgagcgtgcgcgactgactaaaacattagcaactataaaagaacaaaatggtgatgtgaaagaggcagcctccattttacaggagttacaggtggaaacctacgggtcagtggaaaagaaagagcgagtggaatttattttggagcaaatgaggctctgcctagctgtgaaggattacattcgaacacaaatcatcagcaagaaaattaacaccaaatttttccaggaagaaaatacagagaaattaaagttgaagt

SEQ ID NO: 677 - DNA, 214 bp, Homo sapiens
  misc_feature 12: n = A,T,C or G
tgggatacaggncacgggcagagctcctggcctcaatgatgcctcctgatctatcgctgggcctggacgaccaacactgggatgatgatgagcagaatggtcatgaagatgcccaaaatcagggcccagatgttcaggcacttggcggtggaggcataggcctgggccccggtcacgtcgccaaccatcttcctgtccctagacttcacggagt

SEQ ID NO: 678 - DNA, 195 bp, Homo sapiens
  misc_feature 172, 173, 174: n = A,T,C or G
accattggtggccaattgatttgatggtaagggagggatcgttgacctcgtctgttatgtaaaggatgcgtagggatgggagggcgatgaggactaggatgatggcgggcaggatagttcagacggtttctatttcctgagcgtctgagatgttagtattagttagttttgnnntgagtgttaggaaaagggcgt

SEQ ID NO: 679 - DNA, 59 bp, Homo sapiens
aggaacctaactatgttcagtactccagatatacttcctgaactgacctggatgaagaa

SEQ ID NO: 680 - DNA, 244 bp, Homo sapiens
accattggtggccaattgatttgatggtaagggagggatcgttgacctcgtctgttatgtaaaggatgcgtagggatgggagggcgatgaggactaggatgatggcgggcaggatagttcagacggtttctatttcctgagcgtctgagatgttagtattagttagttttgttgtgagtgttaggaaaagggcgtacaacgtgcgatccatgcccatccgaaaggatgatgaagttcaggttgt

SEQ ID NO: 681 - DNA, 155 bp, Homo sapiens
gatttttagggttgtttggccagaacaagagaaataactgcagaaaacacatatggttggaaaccatgcgcttgtgactttttctgtagcctatgggagtggacagagtgggtaacccaagatgtttttaagactgactggactaagaatgacgt

SEQ ID NO: 682 - DNA, 284 bp, Homo sapiens
actgagcccatatgacttgacccacaaggggaaatactggggcaagttctacatgcccaaacgtgtgtagtgagtgtaggagataactgtatataggctactgaaagaaggattctgcatttctattcccctcagcctacccactgaagtctttgggtagctcttaagccataactaaggagcagcatttgagtagatttctgaaaaacaatgttatttgttgatttaaaaagaaaactgtatttttattaaataaaatttaaacatcacttcaggaaaaaaaa

SEQ ID NO: 683 - DNA, 272 bp, Homo sapiens
acactttgtgttaaaattcatagggaagacttcttaaaaacaagtgaaattgttaaaaccccccctaagcattacagatggcttatagctgtccacggggttggtagaggtgggaaagggaagggttctaggccagaatgttcctatttagaagacactcaaattacagtctgtgttatgtatgtataccatttattcaatgctactgtgtatataatggaaaacttaagtccagtttgaaacatctagtctttctaggtgtttaaaagtgt

SEQ ID NO: 684 - DNA, 384 bp, Homo sapiens
accattcgaccacaggcagcaaaggacagaacttgatcagctaaaacatcataaccttcaagggcctataggacccttctagaattttctgaatcaggaacggcccatgttgtggcctgtgtagtcaggtgtatattaaagatttactccaggtagatgggttttgctttccaaaattattgtagggttctcagccacaaagataaaaagaaatcttgaactgcaattgaaataaaacatggagcccccaaatccctagctgccatatgatttgaatcagttggagaatgtaaaatcattgccatggtgtgatgtaacaggagtgaagagccctaggtcttggttctgttgctgtctggctgtgtgagcctgggcagttcatgt

SEQ ID NO: 685 - DNA, 652 bp, Homo sapiens
  misc_feature 635: n = A,T,C or G
acttttgagtaaactattcagattagacaggctaatgctaagactgcattttgtgctactgacatgcactatatagatcgtacactactagatggaaagttggtccatgtccatttatttaaagattctgtaacacctgtaatagtatttaatacagctcccacatactatattcctctcacatagacatagttatttttagtggggataaggatatgactttaacatgctatgagattctagctaagtaaaataaaaacaatatggactcagattttcttaggagatattagttcaagtttttaaactgggaaacaatcaacttccatatatccaggagaaacttagcatggggggaggtgccttagttgatgtgcctgataagcaaactgttagttgtctattagtattatgttttcggcttaatgtaacaacaaaagaaagttgtcacactacctctcagataatatcaattacaatcttagagactgtaattgggaatacaatcctataacaagttattaacaatatcatgaatagttattaagtaagtgccagcactacatgcaacttactggtcaccaactcagaacccataaaactatacacatatgcacaaaaaaaaaaactccaangaagatacctatcactg

SEQ ID NO: 686 - DNA, 536 bp, Homo sapiens
  misc_feature 431, 474, 475, 477, 500: n = A,T,C or G
accagctactgaatacaccggatctagatatgcccagttctacaaatcagacagcagcaatggacactcttaatgtttctatgtcagctgccatggcaggccttaacacacacacctctgctgttccgcagactgcagtgaaacaattccagggcatgcccccttgcacatacacaatgccaagtcagtttcttccacaacaggccacttactttcccccgtcaccaccaagctcagagcctggaagtccagatagacaagcagagatgctccagaatttaaccccacctccatcctatgctgctacaattgcttctaaactggcaattcacaatccaaatttacccaccaccctgccagttaactcacaaaacatccaacctgtcagatacaatagaaggagtaaccccgatttggagaaacgacgcatncactactgcgattaccctggttgcacaaaagtttataccaagnntnctcatttaaaaagctcacctgangactcacactggtgaaaagccatacaagtgtacctg

SEQ ID NO: 687 - DNA, 201 bp, Homo sapiens
  misc_feature 16, 17, 18: n = A,T,C or G
acggccagggctattnnntgaatgagtaggctgatggtttcgataataactagtatggggataaggggtgtaggtgtgccttgtggtaagaagtgggctagggcatttttaatcttagagcgaaagcctataatcactgcgcccgctcataaggggatggccatggctaggtttatagatagttgggtggttggtgtaaat

SEQ ID NO: 688 - DNA, 452 bp, Homo sapiens
acttgttccaactcaagacccaggaccacccccaccttctccattactaggtttgaaaccactgcagttattagaagtgaaagcaaggggaagatttggttgtgtctggaaagcccagttgcttaacgaatatgtggctgtcaaaatatttccaatacaggacaaacagtcatggcaaaatgaatacgaagtctacagtttgcctggaatgaagcatgagaacatattacagttcattggtgcagaaaaacgaggcaccagtgttgatgtggatctttggctgatcacagcatttcatgaaaagggttcactatcagactttcttaaggctaatgtggtctcttggaatgaactgtgtcatattgcagaaaccatggctagaggattggcatatttacatgaggatatacctggcctaaaagatggccacaaacctgccatatctcacaggg

SEQ ID NO: 689 - DNA, 254 bp, Homo sapiens
acaacagttgagagcagcaccaagtgcatttagttgaatgaagtcttcttggatttcacccaactaaaaggatttttaaaaataaataacagtcttacctaaattattaggtaatgaattgtagccagttgttaatatcttaatgcagatttttttaaaaaaaacataaaatgatttatctgtattttaaaggatccaacagatcagtattttttcctgtgatgggttttttgaaatttgacacattaaaaggt

SEQ ID NO: 690 - DNA, 481 bp, Homo sapiens
actttctccctttgtaaagacttggggagtaaggacattaccaactaaattgcttcttcgaaactgaagtgagtcccggtttgtttcattttaatgggagggtaataaagatgaaagaccaacattttaactgatggatcccttaagctacagaatagaaatttattgtgttttgagggaatatactaaatgcagctatgtaaaaataaaattcaaacgcccaggattaaaataaaatataatctgaaaacctcatgttctctctttccccaaactaagaaagtgcactgcatgctgttttcacttattcttagaaaacaagcatgaaagattccgcccattcagataatgccaaaaatatgtttaaacttttttttattcttttgaaaaatgatttgtaaattgagggtcatagttcagcatcagtttcatcttctgggattattgttcaagaccagcctctaatgggaggtgaaacggt

SEQ ID NO: 691 - DNA, 291 bp, Homo sapiens
acaccatgctggcaggatatactccatttgccaacggtcccagtgacacaccagaggaaatcctaacccggatcggcagtgggaagtttaccctcagtgggggaaattggaacacagtttcagagacagccaaggacctggtgtccaagatgctacacgtggatccccaccagcgcctcacagctaagcaggttctgcagcatccatgggtcacccagaaagacaagcttccccaaagccagctgtcccaccaggacctacagcttgtgaagggagccatggctgccacgt

SEQ ID NO: 692 - DNA, 411 bp, Homo sapiens
  misc_feature 345: n = A,T,C or G
accagaaaggttggggaccactggcttaaaataccaataaatttttgaaccttaaaaactttgaagaacaaggtaaattggtgttttatttaatgtcctaccctttaatttgttgcattttcctatactctttacactattttatcccaaactatgtatatgaggtgaaaatatatatgaaaagggatactgaagaatatttagtttaaaattaatttcttacgatcacgagcacatggtggcataattacaaagcttggaagtattcaaatagaaaatcaaaggtgtttcaatacagtagaatcccaggactgcattttaaaatcgcctcacagatcacactcnctggtggcaaatatcatcatcgttgctaaaggacagaaaatactgatgtgtgttttaactaactgg

SEQ ID NO: 693 - DNA, 308 bp, Homo sapiens
acttccaatcacttcctctatccagaaaatccgtgacactacatgccagctactttgcatatttataactgtttaataaactattcaaaattagcatctaaaataattatactttgggcacacgaaggcatatatttggtgagaacattgtaattttcattttgtaaactatatattctatattcaagtaataacacagcattgcctatacagaactgaggcctgcgctgagacccaaaacttgtcttttcctaaatgcaccactacgaagagctaataagaggtctgtccagatgctaagaccaggt

SEQ ID NO: 694 - DNA, 300 bp, Homo sapiens
actccaccatttaatagggtaaagaagagaaaccacgtgattatagcagttgatgcagaaaaaccatttgacagaattcaacacccatacatatttaaaaactctcagaaaaataggaattgaggaggacttcctcaacttgttaaagagcacgtgaacacacaccaaaaaaaaccccacaactaatgttatacttaagggcaaaaggtcgaaggccttgttccttagattaggaacaaagcagtaatgtctcttctcaacattaatcaacatattgatggaagttctagccagtgcagt

SEQ ID NO: 695 - DNA, 313 bp, Homo sapiens
  misc_feature 89, 90, 91, 105, 106, 132, 250, 262, 273, 298: n = A,T,C or G
acaagcttttttttttttttttttttttttttttggttaaaaaagtttaatgagctgtaaaataaatacacttggcattaaatattaannnaattatttacaacnngaaaaaatactttttaccttcgtgcncctttatatacagaaatagcataaaaagtgacaattgaaagtttaaaaccatcataacaaaaagggtccattgtcttatgatccactggaaagaggaccgactcatcatttatggctntgacttggcagngactccaatgngatatcctgtaattttatcttcagntatgctatagcatgt

SEQ ID NO: 696 - DNA, 273 bp, Homo sapiens
actggcccaggacagagctgccaaactggttgctgctgtctgccaaggttgctgcagttgagacgtctgtgcggtctgggtaactgagggaggctgagcggctgagtggggtggggtgtgctggggaacggtcggaggggaccgaggtcagggccatagtcccatagtaggagaaggcgcccgtctcaaacttcatgttctccttccctgcctccacctccaccttcccctgcaggatgaggatgaagtagtcggccggcttatttcgggtgt

SEQ ID NO: 697 - DNA, 445 bp, Homo sapiens
accaaagtcaatgaacaagaaacaccagttgactttaagacaatgacgaagattaaagcttaagggaaaaaaataaaagataaacatctgaaagcagcaccagatccttcacttgcaaataaggctagtccagtttaatcttcttggtatcctctctactttttaacatttttccttactaatccatatatttaatttcatgtcatattggatttaatcagactttaaaaattttccctttaatacccatatttaggcattagatatatagaatatgtatctatatataaatatatctctatcgcccatcctgcttatatttgactgaaaaacacaaccaccaaaatggacagttcagcaaaagcgcgttgtctgtaattctctggtgttgcttctgggcaaaccctaagtgatggtggagaatctaacagttcgttaggtctgt

SEQ ID NO: 698 - DNA, 495 bp, Homo sapiens
acacggtgacctcacagaaggagggctatgttctgactgcggtggaaggaaccatcggagacttcaaggcctatgccctggcaggcgtaagctttgagataaaagctgaggatgaccagcccctcccgggagtcctcttatccctgagcggtggcctgtttcgttccaacctcttgacccaggacaacggcattctgacattctcaaacctgagccctggccagtattacttcaaacccatgatgaaggagttccggtttgagccatcctcacagatgatcgaggtgcaggaaggccagaacctgaagatcaccatcacggggtaccgaaccgcttacagttgctatggcacagtgtcttccttaaacggagagcccgaacaaggggttgccatggaagcggtgggccagaacgactgcagcatttacggagaagacaccgtgacagacgaagagggcaagttcagattacgtggattgctgccgggatgtgtgt

SEQ ID NO: 699 - DNA, 413 bp, Homo sapiens
agatgacaaagaaaagaaggaacaatggtcgtgccaaaaagggccgcggccacgtgcagcctattcgctgcactaactgtgcccgatgcgtgcccaaggacaaggccattaagaaattcgtcattcgaaacatagtggaggccgcagcagtcagggacatttctgaagcgagcgtcttcgatgcctatgtgcttcccaagctgtatgtgaagctacattactgtgtgagttgtgcaattcacagcaaagtagtcaggaatcgatctcgtgaagcccgcaaggaccgaacacccccaccccgatttagacctgcgggtgctgccccacgtcccccaccaaagcccatgtaaggagctgagttcttaaagactgaagacaggctattctctggagaaaaataaaatggaaattgt

SEQ ID NO: 700 - DNA, 441 bp, Homo sapiens
  misc_feature 12, 13, 154, 249, 283, 284, 304, 328, 364, 365, 386, 387,396, 414: n = A,T,C or G
acgggaccctgnncacgatggaccgggtgctgacccccccaatggggactgtcatggatgtcctgaagggagacaatcgctttagcatgctggtagctgtcatccagtctgcaggactgacggagaccctcaaccgggaaggagtctacacagnctttgctcccacaaatgaagccttccgagccctgccaccaagagaacggagcagcactcttgggagatgccaaggaacttgccaacatcctgaantaccacattggtgatgaaatcctggttagcgganncatcggggccctggtgcggntaaagtctctccaaggtgacaagnctggaagtcagcttgaaaaacaatgtggtgagtgtnnacaaggagccctgttgccganncctgacatnatggccacaaaatggcgnggttccatgtcatcaccaatgtttctg

SEQ ID NO: 701 - DNA, 487 bp, Homo sapiens
  misc_feature 301, 302, 406, 441, 446: n = A,T,C or G
acatcaaattataaatgcaaaacaggttcagatttcatcttttgtgatttcttttaaatactattcatttttatttaaatgcacagtatttcccctatattttagtccttccattcctagagacaaaccagttatttggtggtgggaagtagctgaagcaaagaaggaaaagtaataccttagcttcaagagtagacattcttactagctcaatttaaataattgattttaaataggaagaaaagaggatatatttaagatacatagaaattatgatgtgaagtattcatgagaatctgtnnattccatcaaaataagtaggaactcatactaaaattgttggatttaaagaggcaacttttgtttatgattcaaatatgggaatttgagaaatatttcatttgtncactggatgtcactattttactaaaaaggcagctnttagngtgggactgtgactgaggtcttaaagactgaaagagttggg

SEQ ID NO: 702 - DNA, 304 bp, Homo sapiens
  misc_feature 13, 158, 159, 160, 247: n = A,T,C or G
tttttttttttgntcggctcagtctaatcctttttgtagtcactcataggccagacttagggctaggatgatgattaataagagggatgacataactattagtggcaggttagttgtttgtagggctcatggtaggggtaaaaggagggcaatttctnnntcaaataataagaaggtaatagctactaagaagaattttatggagaaagggacgcgggcgggggatatagggtcgaagccgcactcntaaggggtggatttttctatgtacccgttgagttgtggtagtcaaaatgtaataatt

SEQ ID NO: 703 - DNA, 366 bp, Homo sapiens
acaaagggactacatcgttggcttttgaccttgctgaaaaggaacatataattgtatggatggtaggattaagttgttgagtagttttgtaatcaagattttatgtaacatttgtaaagggaaaattagcacttttgtggttcttaagggaaaagaaacagaccttgtggagattataatttccttggtttctgttaccactgttagagggagttgtatcatttaacatatagtaggatagtttaagtgtagggaggacaattattgtctgaagctaaaatgggttatttataggactgatggaaatgatttcatctccgccatctctaaagcacttttcattgaacatgttagcctaggatacgt

SEQ ID NO: 704 - DNA, 449 bp, Homo sapiens
  misc_feature 15: n = A,T,C or G
acatggtcacataanaacaaatctaatggaaaaagaatatttcattctacttttctgccacttatcacagtgtaataagtgccagtaagtcctggaagacagttgcagaggaagattagaatcccagggctgtttgttaatatacatgattatattgtaagaataatataaaaacaaaataggtaagatatacaattaacatgcaatttaagctatattattttgaagaaacaggacagaatttagtgaacgcaacttaaaaatttgttaatgtagtataatcagcatatcatggtattttacatggtatggaattattcctccttaataatgcttggcaaattggaacaggctgatcctacttctagaacatattaaaatgaagatgaaggaaaacaagttggataattctattagatgcttttctaaatattctgaatttttaaagt

SEQ ID NO: 705 - DNA, 399 bp, Homo sapiens
  misc_feature 194, 195, 229, 276, 292, 355, 356, 380: n = A,T,C or G
acgatgtctagtgatgagtttgctaatacaatgccagtcaggccacctacggtgaaaagaaagatgaatcctagggctcagagcactgcagcagatcatttcatattgcttccgtggagtgtggcgagccagctaaatactttgacgccggtggggatagcgatgattatggtagcggaggtgaaatatgctcnngtgtctacgtctattcctactgtaaatatatggngtgctcacacgataaaccctaggaagccaattgatatcatagctcanaccatacctatgtatncaaatggttctttttttccggagtagtaagttacaatatgggagattattccgaagcctggtnngataagaatataaacttcagggtnaccgaaaaatcagaatagg

SEQ ID NO: 706 - DNA, 488 bp, Homo sapiens
  misc_feature 15, 16, 17, 372: n = A,T,C or G
gtcagactggatggnnngtgaagtaaaatagtatgaacaattaagaggctctccccctcttgtctttaagccatattctcctacatgtattttataagaaaatgttaagtcaaattttagtggctctttaattcctgacctcttcattctccttttcagtataacctcccctatgctcatgcccacacagacaaaaaaacaaaacgaaatacacacagaaaaaagtctttccaaactgtttaagtatttaaacatctgagccaaagcagatagaagttattgtataattgttaatcactttgcaaataggggctatcagattacctatattggcattgctggattataaactctatatctgtaatataaagngtttgagtttttaattgggctgttatgatcagtagttgattttgagaaagctctatgagctctaagtaactgcatggttttttgttttaatgtaatatagggagacccttcacatt

SEQ ID NO: 707 - DNA, 385 bp, Homo sapiens
  misc_feature 294, 298, 338, 376: n = A,T,C or G
acccagccttgctctcattcccaggacaggaacaggagagcagtgcacctcccaggatgactagggcagaccctgcccagccaataaagatggcagggccaaactcatacttaatgttggtagggatcaaagggttataaaagtctgtgacaatctgatggccataccaggagcaagctaccaaggcggcaagacctgccacgatgaaaattatgcctccacccatggctatacgggccttcttcactttgtcgtctcccccacagcgcgtgcacttcatgcccatcgtggccncaancatggccaggaagcccagcaccaggggagaccaccattanggctcgagtggcctgcaaggccgcggacagggcgagcnccgagtcgt

SEQ ID NO: 708 - DNA, 390 bp, Homo sapiens
  misc_feature 163, 164, 358, 363: n = A,T,C or G
acagcattctggaataaagcaagagtgttcattcacacacacagtagcttcaaaactgttcgatctgtttgttcccatgtagttttctaaagatggaaaaaaaggactttggtcatcaagactactgtggccatattagattactggaacatctaagcatcanntgtgtgaccatgcgaacaaaagacttcggggagtgtctatttttaaaaaggtttatgtgtgtcgaggcagttgtaaaagatttactgcagaatcaagcccacttttaggcttaggaccaggttctaactatctaaaaatattggctgataacaaaaagtgttctaaatgtggctattctgatccatagttgttnttttnaagaaaaaaatgtatatacagaacctg

SEQ ID NO: 709 - DNA, 551 bp, Homo sapiens
actatgctaggtataggtaaccactcttcacttttcttctttcttcaataagaagatttggctaatccttgcaacgtattagaaaaatactcttttccagctaattagaagcctcctccgtggcaaggcgacaggcagaaccagttggctgacctaaccacctgtgcacccaaagtggcgagtctgggtttggagttgcaggagaaagacacttaggcattggaagggtttttacatatggccttgttttttccccaagtataaatgaggaatttggtgatgtgaaattgagtccaaaatgaaacgaaaacataaacccatgaagaaaatgcaacccaccactcttcaaatttatgacatttaaaaatcccctctccccattaatataaaatagccaggggttggggggaaaaagctccctatggttttattcaccataaccttagtgtttctcaattggaacttgttcgtgggaacactgatttgtgtttgaggaaactatttggtttgcaaaacaacaagcaaaatttcttacttcactagtatcctat

SEQ ID NO: 710 - DNA, 307 bp, Homo sapiens
acagataaattacataattaacttttttgtctattaacaatttccttaaatatttctgggattaatatatcatttcatgttacaactgcagaaatatgaattaccatatcagtctttaaaaatgccgaattctatagggcccagtagtatactttacattttgtaatttttaaaattcagtgtatttacaggtctctaaatgaatcactttagaatgcttgatttcactcttggtaaatagaatgattacctgtattttatatatgcaactgtttacaaccaaaataagattgatttagaacaaagt

SEQ ID NO: 711 - DNA, 544 bp, Homo sapiens
  misc_feature 517: n = A,T,C or G
accacagcaaaacaacttcagtgactgtggtgtatatgtattgcagtatgtagagagcttttttgagaatccaattctcagttttgaactacctatgaatttggcaaactggtttcctccaccaagaatgagaacaaaaagagaagaaatccgaaacataattctgaagctacaggaagatcagagcaaagagaaaagaaagcataaggacacttactcaacagaagcacctttaggcgaaggaacagaacaatatgtcaatagtatctcagattgaccatttctgttacttgtcatttctactttcagaaactaaatgactttcaaatttgggtatagacaataaagaactgaagtgcccactactcagtgatttggaaattttgatgcttgtataaatgtcagataattaatttccaaaggcgtatgtattaagtaaaagtctgtaaatatgttaatgaggccaatttttccagcatttataattatttttttcacttgttaggaagctttttgntatgtattttctgttaatagtacctgc

SEQ ID NO: 712 - DNA, 505 bp, Homo sapiens
  misc_feature 445, 471: n = A,T,C or G
acacccatggaacaacttatatctttagtaaacaagtgcaacattattgtcagttattttgcatgtttaaatattatagtctgattatttgtaaacaaacaaaaccccaaatactctaaattctattttaaaaatctgtcaacccacaattattctaatatgctttacttactcgaacacaaatttctgaaaggtgcatatattaccttagataataaggtttagaaatgagtgcttcacactatgaaatgtgcatttccgataagtgatttatgcagcataaagtttagatcaagaaattacaaatcctggatccccacagttcatttagaaaatgcctcaaagttatggctcttgcagcaggtttaacagattaaacattaagtgttctagctccctctatttcaagtatcaaagaaatatgaggctcaaaatctctctaggnttgtaactgataatgcaaaagcattngaaaacagttaaatgtgttttgaaatacagtatt

SEQ ID NO: 713 - DNA, 177 bp, Homo sapiens
  misc_feature 13, 80, 156, 157: n = A,T,C or G
aaaatagataaanatatttttttcaggaaatagtgtggtgtttccagtttgatgttgctgggtggttgagtgagtgaatnttcatgtggctgggtgggtttttgcctttttctcttgccctgttcctggtgccttctgatggggctggaatagttnnggtggatggttctacccttt

SEQ ID NO: 714 - DNA, 306 bp, Homo sapiens
  misc_feature 36, 108, 177, 200, 218, 284: n = A,T,C or G
acaagcttttttttttttttttttttttttttttanctctagagggggtgctatagggtaaatacgggccctatttcaaagatttttaggggaattaattctaggacnatgggcatgaaactgtggtttgctccacagatttcagagcattgaccgtagtatacccccggtcgtgtngcggtgaaagtggtttggtttanacgtccgggaattgcatntgtttttaagcctaatgtggggacagctcatgagtgcaagacgtcttgtgatgtaattattatacnaatgggggcttcaatcgggagt

SEQ ID NO: 715 - DNA, 297 bp, Homo sapiens
  misc_feature 70, 71: n = A,T,C or G
atcataatggctattcctagttttattgctatagccattatgattattaatgatgagtattgattggtannattggttatggtctcattgtccggagagtatattgttgaagaggatagctattagaaggattatggatgcggttgcttgcgtgaggaaatacttgatggcagcttctgtggaacgagggtttattttttggttagaactggaataaaagctagcatgtttatttctaggcctactcaggtaaaaaatcagtgcgagcttagcgctgtgatgagtgtgcctgcaaag

SEQ ID NO: 716 - DNA, 439 bp, Homo sapiens
acactgttaagaagttgagcttttatcttagaggcagcagaaggtttggagccaaggaatgaaatgatgaggcgtccttcaggtaatgaacttcagctgcagtgtgaaaggggcaggaagactggcagctgtcaaaactggaacagtccagtgagtatgtgcaggcccgggcttgggcagtgacgagggcagggagcacacatcaatttctgcggtagaaccttctagaggaagaccagacagagggtcaacagagttgaaaggagaaaataattgaggatgaggtccaagtttttagtttcagagactaggcatatggttaatatttaggtaggaaattcaggaaaaggagcttgtggggcaggaagggaaggaacggcagcttggggcactctgacatctttaacaagtcttgtaaaggcttactaaatacaacgaa

SEQ ID NO: 717 - DNA, 430 bp, Homo sapiens
gctaaggcaaaatacagatgaacatgcacgagtaatgtcttggtgggattatggctatcagatagctggaatggctaatagaactacgttggtggataataacacctggaataacagccacatagcactggtgggaaaagctatgtcttctaatgaaacagcagcctataaaatcatgaggactctagatgtagattatgttttggttatttttggaggggttattggctattctggtgatgatatcaacaaatttctctggatggttaggatagctgaaggagaacatcccaaagacattcgggaaagtgactattttaccccacagggagaattccgtgtagacaaagcaggatcccctactttgttgaattgccttatgtataaaatgtcatactacagatttggagaaatgcagctggattttcgt

SEQ ID NO: 718 - DNA, 174 bp, Homo sapiens
  misc_feature 124, 125, 134, 135: n = A,T,C or G
acacagcatgccgccatggcagcaaagctggaatcagtgagatgtttgaggggcatcaaggaccaatcactggcatccattgtcatgcagctgttggagcagtagacttctcacatctttttgnnacttcatcnnttgactggacagtaaagctttggacaactaagaataaca

SEQ ID NO: 719 - DNA, 589 bp, Homo sapiens
  misc_feature 520, 555, 556, 561: n = A,T,C or G
actcactatgtccagcactgtgctggcagggatagaaatatatcccttgacaaccgaatcttttttgggggttagggggtgattaaaaacttcatacatgaaacaatgaaggattaaaagacagtatacaatcaagtgctaacttgtggagaaatgcatttaggagtgcgatagtgctttagggatttcaagaagggagagatgtatttggagttgttgttgccatttcagtagaactgatctcagggatgaggacagaaccatctacatttgttgcagtcctttggaactgtagactggtgcacataccctctctttcgggaagagatagaaatctttggtttgatactgattagcacagtcctagatttctacagctttggtaggctaccagtgatcatatatacaacttatcgtatatataactaccttgagcagcatgtcccaatgtcgtttttgttttcactgtccctcttttttgagaaataagcaggatgttggccaaagtagggcttgtttncagcaagtagcatcctaacctccgtatcactttcnnggagncaatcttgatctttcaactattatgttg

SEQ ID NO: 720 - DNA, 472 bp, Homo sapiens
  misc_feature 188, 436, 446: n = A,T,C or G
gctatgaacaccacaacagaagagattttttactattatgacacaaacacagggaaagagggcaaactagacattgtaatgcataagatgcaggaaaaagtgcagagcattaactataacccttttgaccagaaactttatgtctataacgatggttaccttctgaattatgatctttctgtcttgcngaagccccagtaagctgtttaggagttagggtgaaagagaaaatgtttgttgaaaaaatagtcttctccacttacttagatatctgcaggggtgtctaaaagtgtgttcattttgcagcaatgtttaggtgcatagttctaccacactagagatctaggacatttgtcttgatttggtgagttctcttgggaatcatctgcctcttcaggcgcattttgcaataaagtctgtctagggtgggattgtnagaggtctangggcactgtgggcctagttgaagcct

SEQ ID NO: 721 - DNA, 292 bp, Homo sapiens
  misc_feature 11: n = A,T,C or G
acttgctacancccctgacaaaaaaaagcagaaattgctagaagaaaacgttagtgctttcaaaacagaatatgatgctgtggctgagaaagctggtaaagtagaagctgaggttaaacgcttacacaataccatcgtagaaatcaataatcataaactcaaggcccaacaagacaaacttgataaaataaataagcaattagatgaatgtgcttctgctattactaaagcccaagtagcaatcaagactgctgacagaaaccttcaaaaggcacaagactctgtcttgcgt

SEQ ID NO: 722 - DNA, 400 bp, Homo sapiens
attggagtgctggttggggttgctctgatatagcagccctggtgtagtttcttcatttcaggaagactgacagttgttttgcttcttccttaaagcatttgcaacagctacagtctaaaattgcttctttaccaaggatatttacagaaaagactctgaccagagatcgagaccatcctagccaacatcgtgaaaccccatctctactaaaaatacaaaaatgagctgggcttggtggcgcgcacctgtagtcccagttactcgggaggctgaggcaggagaatcgcttgaacccgggaggtggagattgcagtgagcccagatcgcaccactgcactccagtctggcaacagagcaagactccatctcaaaaagaaaagaaaagaagactctgacctgt

SEQ ID NO: 723 - DNA, 195 bp, Homo sapiens; identical to SEQ ID NO: 8

SEQ ID NO: 724 - DNA, 538 bp, Homo sapiens
  misc_feature 493: n = A,T,C or G
acctgaagatttaagagatttttggtagttgctggcatggtccctcgacacttaaagtttatatcacaaaaacaaaactaggttggtttcagctctttagtcctttgttaaaaaccataaatcaaatttggttatttaaaagtgaccttaaaaagtttaaaggaaaatatatatattctatcttcccaataagaaacagatttcatatttatacttaaatggcaaataaatatattttaaagccaagcaagttcctctcctctatacaggctaagaaaacagagttattatatctttattgctgatgatcacatcactcatcaagaactagtttcacaattttaggagacttttttcatgacataatataaaagataagggtctaacttaagtctgagcaggcagaatagagctgtgctcccaacatccctatcacaaacatatgacgaatgaacaacaaaacaactgaatctgtttacatcataaccattgnctatgtgatacacaactgcttgcttttctatgggttaataccacc

SEQ ID NO: 725 - DNA, 563 bp, Homo sapiens
acgtatttatgtcctttggtgccttgcacagtaaggcactgttaatgacgtagcagaatagaggaaatgcccacagcaaatagttctagtgacaatttactagacaagttacagtttaataatggtggtggtgattgtttctttcattttattattattatttttttacaataagggtgtagcctttatactccacacacacaaaataaaacaagttacagtttaataatggtggtggtgattgtttctttcattttattattattatttttttacaataagggtgtagcctttatactccacacacacaaaataaaaacaagtgcttattacgaaaagagtccctgcccccaccccccagaacatcctgaacatagcaattcaacagaacagaaaattcaaggcgtttgatttcaaaatttcaataaaaaagcaaaagtatgtaatgcaacagctgttcaacttccaactctaaacaggcaccattaaacaaaaaaccccagtattttaaatttctccagcacacattccaggatcaatgctctgaactgtaatcagctagt

SEQ ID NO: 726 - DNA, 195 bp, Homo sapiens; identical to SEQ ID NO: 8

SEQ ID NO: 727 - DNA, 323 bp, Homo sapiens
accagactgggacattcctcacatcaaagaacttttaccagaaatgactgtgattcccaagctagcctcaatcatacctctctagtgccctctacggaaaatttttaggaaaactatcttgggaatgtatttttccagtcccagagagtgttaaattggtgagtttggaattcttaggatgctttttctttttaatgagggacaaataaatgccacatatttaaccgtggttaactaggaactgcttgactttgagtttcttttttgttttcttctaaataaaacctggttaaaaaaggagtgctttttcgttgtgcacaagt

SEQ ID NO: 728 - DNA, 320 bp, Homo sapiens
actttggaattcttagtcacaaaatatattttgtttacaaaaatttctgtaaaacaggttataacagtgtttaaagtctcagtttcttgcttggggaacttgtgtccctaatgtgtttagattgctagattgctaaggagctgatactttgacagtgtttttagacctgtgttactaaaaaaaagatgaatgtcctgaaaagggtgttgggagggtggttcaacaaagaaacaaagatgttatggtgtttagatttatggttgttaaaaatgtcatctcaagtcaagtcactggtctgtttgcatttgatacatttttgt

SEQ ID NO: 729 - DNA, 276 bp, Homo sapiens
cacaaaagtatattttatcaaattgctgtaagctgtggatagcttaaaagaaaaaaagtttcctgaaatctgggaaacaagacatttaaagaatcagcaaaatttcaaataaaaaattatgaaaatattatcctcattagttcatttagtcccatgaaattaattattttctctgcttgatcttggtggacagtttcatgaagctgtcagttagttcattaaagttttggaaattctcagacagtgcagtggtatcagaaacttgtattcaagagt

SEQ ID NO: 730 - DNA, 195 bp, Homo sapiens
accattggtggccaattgatttgatggtaagggagggatcgttgacctcgtctgttatgtaaaggatgcgtagggatgggagggcgatgaggactaggatgatggcgggcaggatagttcagacggtttctatttcctgagcgtctgagatgttagtattagttagttttgtcgtgagtgttaggaaaagggcgt

SEQ ID NO: 731 - DNA, 317 bp, Homo sapiens
actctgccttttacgagatgaggtaagacatatacatagatggcttttactagccaaggcaatgtaaatggactaagattctcatgtgacttgaggttatctgatgaatttattctcttcaaaaccacctacttttagagggcatgtttaacccctctctttatttaaggagggagagaaaaacacatgttaccagaattcagagtgggttactcaacctaagagaacatacggagttctctttgggaaaacgacaagactacagtgttcacttcgcaccatgaagtggcactcctgttatggctgtcagagtcctc

SEQ ID NO: 732 - DNA, 354 bp, Homo sapiens
  misc_feature 180: n = A,T,C or G
acttatcagaagcctacttcaggaagacagggaagcgatccaaggccaatatcattttcaacacttctcttggagccattttcggggttaagaagtatgcagatgccctgcaggagatcatccaggagcggaacctcactgttaactacaagaaaaacctcattgaagtccgagccgatnaacaagaggctgtatttgagaacctggacaaaccaggagagacccaagtgatttcatatgaaatccttcatgtcacacctccaatgagcccaccagatgtcctcaagaccagtcctgtggctgatgctgctggttgggtggatgtggataaagaaactctgcaacacaggaggt

SEQ ID NO: 733 - DNA, 312 bp, Homo sapiens
  misc_feature 94, 95: n = A,T,C or G
acaaaaatagcaattaatttgtaaacactgccagaatactttctagctgctttgtaattttttaagagtgttattttgtttttgtttttctgtnnctttgtatgtggctcttgttttcatttttgttgtatgtgtagatctgtaaataaaattgcagtatttaaagcttaagctttcaggaaaaagaaaataagaattcagtgtgtgcatgacaactcgtgtgtatgagaaggagggatatgaaggaagatggcttgcagagtaagtcgggtggcaattgtcagggtgtgggaatttcttttcctacggggt

SEQ ID NO: 734 - DNA, 546 bp, Homo sapiens
  misc_feature 14: n = A,T,C or G
acagctaggctcancagcaaaagtgaagaataagaatgaaaggtgaaaagctgacagatgccacgcagagcaaggacttccatgaaggtccgtgtcctgtgtgccaaacacagtcaacattccatcattttctcattgctcttaaacgagcaaaaccaaattctttttctatttaaagaaatattaaatctttattttccccaacataatttgtgatcaggtaaggcaaagataagtccaccatcactggggacagcagcaacatacagacttcagaaatagccctgaatcatcagtaacattctatcgtggtaacatcagaaggaatgcagctaacaaattaaatttgtaatgttgtcacattattctaatttatttgattagtttatctggaaaaactttataaatacattatgtaagagggcagtaaattattttcttgctttgaaaaaataatgttttttcacattttaaaacattttagtctgcttttgcaaaaggagttgcaagaaaaatgtgacagctgggtttgcagaatgtccatgt

SEQ ID NO: 735 - DNA, 469 bp, Homo sapiens
  misc_feature 183, 184: n = A,T,C or G
acctgtgggtttattacctatgggtttatatcctcaaatacgacattctagtcaaagtcttggtaatataaccaatgttttcaaatgtattctgtcatacaaagagcagatttttattgaacttgtgcaataactatattaccatacaatataaatattcatgaatagtttcccaagtctggnncgaccacatagggagaaaatgtaaatgtctcaatttttgttcacaaaagtatattttatcaaattgctgtaagctgtggatagcttaaaagaaaaaaagtttcctgaaatctgggaaacaagacatttaaagaatcagcaaaatttcaaataaaaaattatgaaaatattatcctcattagttcatttagtcccatgaaattaattattttctctgcttgatcttgggtggacagtttcatgaagctgtcagttagttcattaaagttttggaaattctcagaca

SEQ ID NO: 736 - DNA, 275 bp, Homo sapiens
  misc_feature 16, 17, 18, 160: n = A,T,C or G
ccccagttcatggtannntgttacagcaatcctaggaagctaatactctgacagaaaaaatcttggataatatgcatgagaaaaatccttcaataaacacaaaattggtttcaaaatgttttcatgtaaaaataaattaacttttctgtaattagattgngttttatagtaattcttgcctgcttcttagtctttgttgtaggatgcataataaaatacatgaatgagttttaaatggttagctttggagaatggttttgggaagttcctacagt

SEQ ID NO: 737 - DNA, 363 bp, Homo sapiens
acaccctgcccccatcccaggaggagatgaccaagaaccaggtcagcctgacctgcctggtcaaaggcttctaccccagcgacatcgccgtggagtgggagagcaatgggcagccggagaacaactacaagaccacgcctcccgtgctggactccgacggctccttcttcctctacagcaggctaaccgtggacaagagcaggtggcaggaggggaatgtcttctcatgctccgtgatgcatgaggctctgcacaaccactacacacagaagagcctctccctgtctctgggtaaatgagtgccagggccggcaagcccccgctccccgggctctcggggtcgcgcgaggatgcttggcacgt

SEQ ID NO: 738 - DNA, 130 bp, Homo sapiens
  misc_feature 97: n = A,T,C or G
gcttttttttttttttttttttttttttttttaagctttaaaaaaatctttattctttcaatttaaaataatgaatcaagtgcctgctatgtgttanatattatattacatcttaggaattcaaagtggt

SEQ ID NO: 739 - DNA, 195 bp, Homo sapiens; identical to SEQ ID NO: 8

SEQ ID NO: 740 - DNA, 241 bp, Homo sapiens
accctgactgcactacagtggtttatctatgactccgtgaaggtctacttcagacttcctcgccctcctccacccgagatgccagagtctctgaagaagaagcttgggttaactcagtagttagatcaaagcaaatgtggactgaatctgcttgttgatcagtgttgaagaaagtgcaaaaggaacttttatatatttgacagtgtaggaaattgtctattcctgatataattactgtagt

SEQ ID NO: 741 - DNA, 416 bp, Homo sapiens
acatttttgttacagacagaaggctgattttggaaagaaagaaacaataggatgtatagtgctttctatcagcagactagtatgtttaaaaatagtctcatcaagggttctgaataagaaatataaatgttgccaggcagtcccaaactcacatttgatattaactgcagactcatttaaaactgaaaactgctccagcctctctcaatctttactaaggactgggagattatcaaaccctttcaagtctaataatgcttttgaattaagattattgaaaaaaggaatctctgttacagtgcaaagaacattttgatagaaattcatgtctacaaaggagttaaatacagatgtcccttacattagcagatactattcttgctctaaaaaggtagaattatcaagacattgtaaat

SEQ ID NO: 742 - DNA, 235 bp, Homo sapiens
  misc_feature 13, 14, 15, 166, 184, 187: n = A,T,C or G
ttttttttttttnnntttggctctagagggggtgctatagggtaaatacgggccctatttcaaagatttttaggggaattaattctaggacgatgggcatgaaactgtggtttgctccacagatttcagagcattgaccgtagtatacccccggtcgtgtagcggngaaagtggtttggtttanacntccgggaattgcatctgtttttaagcctaatgtggggacagctcatga

SEQ ID NO: 743 - DNA, 225 bp, Homo sapiens
acgttctaattgagagcattccagtagtatcaaacaataatgtctactgtttatagtccacttaataaaaatagaggcatttactatttgccttaggctgataggaatgtgggttttcttgaccaaatatatcagcatctaattgaaatgaccaaatagcattcttagacttctgtattatgaatataattgatatttaaattaatgtcttgttcacatatgtgt

SEQ ID NO: 744 - DNA, 283 bp, Homo sapiens
  misc_feature 280: n = A,T,C or G
gtaatttttgcctttgtttaagcctggaacttgtaagaaaatgaaaatttaatttttttttctaggacgagctatagaaaagctattgagagtatctagttaatcagtgcagtagttggaaaccttgctggtgtatgtgatgtgcttctgtgcttttgaatgactttatcatctagtctttgtctatttttcctttgatgttcaagtcctagtctataggattggcagtttaaatgctttactcccccttttaaaataaatgattaaaatgtgctttaanaaa

SEQ ID NO: 745 - DNA, 351 bp, Homo sapiens
  misc_feature 13: n = A,T,C or G
accctagtaacangtcatatcacgatcaataaatgatcacagcctttcgaaaaaactactgagattggagaatgggtttctgtctccaacccctgaaagacgttgctgcttcaagacctacagctccaagaagacaactcagaatttcttacttttaaaaaaatattgtcatgaataactgaataattagatttctaggaaaatgaggcttttaaattaagatttagcaaaatcaactataatgtatttacttctactcattgatgaatgacagaaatcagttaaagttttacatacaaaagatataaatactgcataatacgtagtgaatattggtacaaaccctttcgt

SEQ ID NO: 746 - DNA, 453 bp, Homo sapiens
  misc_feature 15, 339, 340, 421: n = A,T,C or G
acctgtgggtttatnacctatgggtttatatcctcaaatacgacattctagtcaaagtcttggtaatataaccaatgttttcaaatgtattctgtcatacaaagagcagatttttattgaacttgtgcaataactatattaccatacaatataaatattcatgaatagtttcccaagtctggagcgaccacatagggagaaaatgtaaatgtctcaatttttgttcacaaaagtatattttatcaaattgctgtaagctgtggatagcttaaaagaaaaaaaaaagtttcctgaaatctgggaaacaagacatttaaagaatcagcaaaatttcaaatnnaaaattatgaaaatattatcctcattagttcatttagtcccatgaaattaattattttctctgcttgatcttggttggacngtttcatgaagctgtcagttagttcattaaag

SEQ ID NO: 747 - DNA, 442 bp, Homo sapiens
  misc_feature 255, 287: n = A,T,C or G
gcctgtgggtttattacctatgggtttatatcctcaaatacgacattctagtcaaagtcttggtaatataaccaatgttttcaaatgtattctgtcatacaaagagcagatttttattgaacttgtgcaataactatattaccatacaatataaatattcatgaatagtttcccaagtctggagcgaccacatagggagaaaatgtaaatgtctcaatttttgttcacaaaagtatattttatcaaattgctgtnagctgtggatagcttaaaagaaaaaaagtttnctgaaatctgggaaacaagacatttaaagaatcagcaaaaattttcaaataaaaaattatgaaaatattatcctcattagttcatttagtcccatgaaattaatttatttttctctggcttgatcttggtggacaggtttccatgaaggctgtca

SEQ ID NO: 748 - DNA, 399 bp, Homo sapiens
acatttaaggcttttaaatgtggaaaaaaaattaaaaccaaagaacccccaaatccaaacccctaaccaacacaagtagtatagcaatgttaagcatctcctatttctgatgcttatttggcgcaacttccagtgtcaaaacccaaataattcctaaactaaaaagattagtttagtgaaattttaattacataaattcttcaaagcataaacttggaatttttgtcttggaaatgttataaaatttttaatagcaaaacataggaataaaaacatattaacaaaatgtattcaatcatttacattacaaacaaggaatctgcagttcattgttgtggcctgacaaaagaaatcatatctaccattaagaatctatgcacaatgtgattgcaaatatgt

SEQ ID NO: 749 - DNA, 441 bp, Homo sapiens
  misc_feature 16, 17, 332: n = A,T,C or G
actggggttcttttannccccgtaggtctgtagaatattttaaaaggctagaattacctcaaaaatagtcttgaaataatactgagtccttctaaagagctcactggatattttaataacatttacagaaagacaaaatttgcagtagctgagtttaagtgaagaataatgtagaactaacgtgggctaaaatgtttcataattaacgtcaaaaattgccaagattattaatatatattttggtaatcactattgaccaggttaatttttttgtgcaaaatacactatgtattaatagaacaggaaaataattatttcagaccactaacaanaagaaaacccacagcaagagaagcatctgtagggcaattaaacgttagggaagtttactagctttagaatacatcaatatacttcgataaacaaggagtgttttaatgt

SEQ ID NO: 750 - DNA, 175 bp, Homo sapiens
  misc_feature 147: n = A,T,C or G
actgtctgggtatcggaaagcaagcctacgttgctcactattacgtataatccttttcttttcaagatgcctgaggaagtgcaccatggagaggaggaggtggagacttttgcctttcaggcagaaattgcccaactcatgtccctnatcatcaataccttctattccaacaagg

SEQ ID NO: 751 - DNA, 547 bp, Homo sapiens
  misc_feature 17, 18, 209, 212, 213, 222, 223, 246, 297, 337, 350, 352,357, 377, 379, 380, 409, 472, 473, 534: n = A,T,C or G
ttgataaggaattctcnnaccgataggatgtctgtctgggctttgctgcgggacagtctaactgtgggggctaggggaaagcaggagagtatcgatcaaagagtaagccacacacggataatcagttactagggatggaggtgtgagggttcattatattattcattttactgttgtatatgtttgaaaatgtctataataaaaagctntannaaaaaaaanngaaacaaaaatagttcaggccancaatgggccctccatgttcagtggattttatccttgtttcaattggggtangagttccaggaggtgtggattggaggttgtctaaagaatngaactggcctttntncctgnttcctgggagggagactttnannccttgacatttccagggtaataggagtgnctttgttatttgtgaggccatgggatcacacctgagcttatgctaaaaggtgggatgactcannagctggggctggtcaccagacagactgaccatgtgattagaggtttgaggctttgagtcancctgacctatggg

SEQ ID NO: 752 - DNA, 222 bp, Homo sapiens
accccagtcgtatcctctgtccgcatgtgtggccaggcctgacaaacacctgcagatggctgctgccccaacctgggacctgcccaggaggttggagcagaaagggctctccctggggtggtgtttctcctctagggtattgggatgcatgttctgcactgccagcagagagggtgtgtctgggggccaccacctatgggacacggggtcgaaggggcctgt

SEQ ID NO: 753 - DNA, 578 bp, Homo sapiens
  misc_feature 36, 37, 511, 526, 550, 576: n = A,T,C or G
acatgtcttccatgtatcttttgaactggcaattgnntatttatcttttatttttttaagtcagtatggtctaacactggcatgttcaaagccacattatttctagtccaaaattacaagtaatcaagggtcattatgagttaggcattaatgtttctatctgattttgtgcaaaagcttcaaattaaaacagctgcattagaaaaagaggcgcttctcccctcccctacacctaaaggtgtatttaaactatcttgtgtgattaacttatttagagatgctgtaacttaaaataggggatatttaaggtagcttcagctagcttttaggaaaatcactttgtctaactcagaattatttttaaaaagaaatctggtcttgttagaaaacaaaattttattttgtgctcatttaagtttcaaacttactattttgacagttattttgataacaatgacactagaaaacttgactccatttcatcattgtttctgcatgaatatcatacaantcagttagtttttangtcaagggcttactatttctgggntcttttgctactaaggttcacattanaa

SEQ ID NO: 754 - DNA, 306 bp, Homo sapiens
acacaatggtttattaaaggaatgtatggcccacatcaacctagcaaggattctactggtaaaccttcccatggccaaaggaaaaacaagcaggagttgagtggctggggtggggtgcaggcaatggagagagggcagaagggtgtagaagctgaagggggctagaagcttactcctgagtttcttccttctgtcttcaaatctttacttcttatggccaaagacccagctgtttcataggctggagatgcactcttctagactgctcaagacagccagagacaggggaggagggaagaaggatac

SEQ ID NO: 755 - DNA, 281 bp, Homo sapiens
  misc_feature 18: n = A,T,C or G
acactttccaacaggcanaccctaccaggaactgggagacaagagcgggctctctcctgagataagacaagtttaacgtgaagaccttttggaaaattcccgggttttcctggctcttttcagttggtgtttctctgaggaatagggaggttctcatgaagatattttaaacttccatgctctgagaaatctgagaccacgtggtccttccctcgcagcagccacttagtagtaagcagtccctcaagtcctactggtccccgggcgtggattctcgatgt

SEQ ID NO: 756 - DNA, 205 bp, Homo sapiens
acatctctacaatagaatactactcagcaatgaaaaggaacaaactgctgatacacacaacagcatggatgaattacaaaggcattatggtgagtaaaagaggccagtctcaaaagagtatatttagtaggaccaaaactggatttggtagaaatcacatcagtggttgcttctaggagctaggggagacgaagtggaagggggt

SEQ ID NO: 757 - DNA, 490 bp, Homo sapiens
actgaccatcagaattaaaagaaaaggctggtctcagcagctcacacctgtaatcacagcactttgggaggccaaaaggactgcttgagcccaagagttcaagaccagcctgggcaacaaagtgcgaccccatctctacaaaataataatcataatagaaagaaaagaacggcttatgagagcttgggcaatacctgttggaaaggagcgaaggggaaagacttagtgccagcagagaactactacatactaaatcctaaaagcttaatatttccaagttaagcctatattaactgtgagaatgtttaaaatgtaaatgttatactaaaacgtggtatcttaaaactctaaaactattagttcccaagcttctgttctatttcctaactcttaaaaaaaaagaggatttaaaaaactgtattacttctatttttcctgtttttctaattcttctattttaaaaatgacctttacccataataaaccataa

SEQ ID NO: 758 - DNA, 410 bp, Homo sapiens
ccggactcccgtcccggctcatcacccggcctgtggcccactcccaccgccagctggaaccctggggactacgacgtccctcaaaccttgcttctaggagataaaaagaacatccagtcatggataaaaatgagctggttcagaaggccaaactggccgagcaggctgagcgatatgatgacatggcagcctgcatgaagtctgtaactgagcaaggagctgaattatccaatgaggagaggaatcttctctcagttgcttataaaaatgttgtaggagcccgtaggtcatcttggagggtcgtctcaagtattgaacaaaagacggaaggtgctgagaaaaaaacagcagatggctcgagaatacagagagaaaattgagacggagctaagagatatctgcaatgatgt

SEQ ID NO: 759 - DNA, 440 bp, Homo sapiens
  misc_feature 281, 319: n = A,T,C or G
ctttgatttgtgctgagggtcagcttttggctccttcttcctgagacagtggaaacaatgccagctctgtggcttctgccctggggatgggccgggttggggggtgggttggtgaggctttgggtgccactgcctgtgggttgctggcttaaaggacaattctcttcattggtgagagcccaggccattaacacctacacagtgttattgaaagaagagaggtgggggtggaggggaattagtctgccccagctagagggagataaagagggctagttagnttcttggagcagctgcttttgaggagaaaatatatagnctttggacacgaggaagatctagaaaatttatcattgaacatattaatggttatttctttttctttgggatttccagaaaagcctcttaattttatggcttttctcatcgaagtaaatgtt

SEQ ID NO: 760 - DNA, 508 bp, Homo sapiens
acctgtgggtttattacctatgggtttatatcctcaaatacgacattctagtcaaagtcttggtaatataaccaatgttttcaaatgtattctgttatacaaagagcagatttttattgaacttgtgcaataactatattaccatacaatataaatattcatgaatagtttcccaagtctggagcgaccacatagggagaaaatgtaaatgtctcaatttttgttcacaaaagtatattttatcaaattgctgtaagctgtggatagcttaaaagaaaaaaagtttcctgaaatctgggaaacaagacatttaaagaatcagcaaaatttcaaataaaaaattatgaaaatattatcctcattagttcatttagtcccatgaaattaattattttctctgcttgatcttggtggacagtttcatgaagctgtcagttagttcattaaagttttggaaattctcaggacagtgcagtggtatcagaaacttgtattcaagagtacctcg

SEQ ID NO: 761 - DNA, 537 bp, Homo sapiens
  misc_feature 224, 225: n = A,T,C or G
acaccgtcatatctcaaaagttcagtgctggccatcttgcatcaaatgttcttaaggcagtgactggctatcaaccacagtttctgtctccccagttgcaaacacaggatccatgcaacagttctgagaccatacacttagaaaccacaggggatgcggatcaaatgcagaactcccaaattataaaacagtcaggctacactcaaaacaaaacatagaacatnnacaacacacatctcccaaaaaagaagtgcaacgcatgcttgtataaaccaacaataacaaaaaaaccacaataaaaaatgcagagtctcccaaacaagttttcaaatgtattgcagaaggaaaaaaaatgtatatatataaaattaaaaagtctgaaatactagtgcataggtcaattacctaacaccaaggtttcttttctttctgtccaagctctactgcccctctgatactagcagcatgtctacaggctaagaccatagcaggcaaaaaacgttttttcatttgggcatttacaaaattaaattactg

SEQ ID NO: 762 - DNA, 284 bp, Homo sapiens
actaataaatatttatagatgagtgaatgaggaaataattacatcaaaaaggtcagtgacaattgataaatgacaaggaaatatttaattaggtaaaactaaatcattgctctctatactaggatagactttatctacttcatctgttcctaagtcagcatgttagttctggggaaggatcataagaaaggaaatactttttaaaaaaaaatttggaaacatgtaacaaagcaagggtaaaatatatatatatatctatataagtgctgtgactgtaaaagtgt

SEQ ID NO: 763 - DNA, 209 bp, Homo sapiens
accttagtagggcagatataggaaaaacaaattagagcaaaacaaatcctctacaaatccaaggcaggaaaagtggtggcagagtgactcattctcctgtccctcccatcaggtcaaatcaggaggctgcagtgaatgcctgttctttgaatgtgtagcagttgttcctgtaactctttaaaacttggctataggctgtttagcacagt

SEQ ID NO: 764 - DNA, 480 bp, Homo sapiens
  misc_feature 12, 13, 382, 457: n = A,T,C or G
actccatcttanntaaatatgattaatatccactttaattatttgtgatggagatggttagaatagggcatagcagcaggggtctattccactaacattatacctggctgggtgcctgtaatcccagctaccaggtaggctgaggcaggaggatcacttgagaccagttcaagtccagtctatacaacagaaagagacctcatctcttaaccccaacccccaaaaaagactgtctgaatagaattttgatgaaaaattgtaaatttcacatttttatagatttttaaacaccaagcaatgactttaaacagtgattttagtatttccactgcatattcattcctccattctgtttttaattaaaattagccacaatgtttangaaaacaactgtttttccactttaaaaaaaccaactaggcctggtgtggtggctcatgcctgtaatcccacccancactttgggagagaatatctaaa

SEQ ID NO: 765 - DNA, 195 bp, Homo sapiens; identical to SEQ ID NO: 8

SEQ ID NO: 766 - DNA, 411 bp, Homo sapiens
acagctgcccaagggcgttcgtaacgggaatgccgaagcgtgggaaaaagggagcggtggcggaagacggggatgagctcaggacagagccagaggccaagaagagtaagacggccgcaaagaaaaatgacaaagaggcagcaggagagggcccagccctgtatgaggaccccccagatcagaaaacctcacccagtggcaaacctgccacactcaagatctgctcttggaatgtggatgggcttcgagcctggattaagaagaaaggattagattgggtaaaggaagaagccccagatatactgtgccttcaagagaccaaatgttcagagaacaaactaccagctgaacttcaggagctgcctggactctctcatcaatactggtcagctccttcggacaaggaagggt

SEQ ID NO: 767 - DNA, 195 bp, Homo sapiens; identical to SEQ ID NO: 8

SEQ ID NO: 768 - DNA, 178 bp, Homo sapiens
aaaaagtgcagtagaggaaaaagaggagccaaagaatacttcatagaagtgggacctgagttgagctttgaaaggtgatggttgtgtcagaaacagtgttcaaagaacattattaagatccatagtggtgtgtttttatttctaaaattccattggtataattcacacatcacagtct

SEQ ID NO: 769 - DNA, 86 bp, Homo sapiens
  misc_feature 70: n = A,T,C or G
accattggtggccaattgatttgatggtaagggagggatcgttgacctcgtctgttatgtaaaggatgcngtagggatgggagggc

SEQ ID NO: 770 - DNA, 574 bp, Homo sapiens
  misc_feature 510: n = A,T,C or G
acctcttagggtgggagaaatggtgaagagttgttcctacaacttgctaacctagtggacagggtagtagattagcatcatccggatagatgtgaagaggacggctgtttggataataattaaggataaaatttggccagttgacagattctgtttccagcagtttttacagcaacagtggagtgcttcagtattgtgttcctgtaaatttaattttgatccgcaatcatttggtatacaatgctgtttgaagttttgtcctattggaaaagtcttgtgttgcaggggtgcagttaagatctttgtgatgaggaatgggatgggctaattttttgccgttttcttggaattgggggcatggcaaatacagtagggtagtttagttctctacacaggaacatgataaactacacctgttgatgtcaccgtctgtcaatgaatattatagaaggtatgaaggtgtaattaccataataacaaaacaccctgtctttagggctgacctttcgncctttgacctcctcagcctccattcccatcttcgctcagactgcaagtatgtttgtattaatgt

SEQ ID NO: 771 - DNA, 530 bp, Homo sapiens
  misc_feature 494: n = A,T,C or G
acagttatttgtcaagcttagctttgatttcaaaggacacgcttaccttgtctggcataagaattaatgctcatgtctgcagtggttgggtaggtcctgcttaggagaattaaaaaattcctctttccgtttggttgaatgttgcagtcaggaaccccaactcacttggaatgtttttatatgtaatcatttcccttgaagcttatactttataagggaagaaagaattcaggtgatatgggaaaactgcttggcagaccttcatcttctgcctcaactgtaaaccacatgtaaatgcttaatggagactgttttcattcttgtgatatttaacattcagaaaattacttcagctttggaaatactcaggctgtttttattctgcaggtaagtgttttgacttaattactaatattccagaaatttttgaaagcagtaaccttaatttcctatgtatttcattccacttttgcatataggtcaaatagcaatgngtatgcacattctctttagttaaggcaccaattgtt

SEQ ID NO: 772 - DNA, 331 bp, Homo sapiens
atcttggctcccggcaagatggcgccactgcactgcagcctgggtgagagcgagactccgtctcaaaaaaactaaaaaaaataaaaaataaatagagagggatttttttttaagtagctttgtgttttgtggctattgcatctggaagataaaaattgatgtaaagtgttatacacttcttgttgcgcagtagtgctagcggcttcgctgttcggtcctcggaccggcagccgccactggtgttgagctgctaggaagcccctatcggcgagctcgttggagctcgaacccattgtcacccctctgactcaccggcaaaaaaaaaaaaaaa

SEQ ID NO: 773 - DNA, 527 bp, Homo sapiens
acacttttgttacagttacatatatgaatagttagcagaggagaaactcctccgttgttcctacaccaagggaaaaaatgtaaggactgtatagctcatgaagaatattaacatttttctatcacaaaatattgataaaattggaattgtatcaattcatgttatggagcttaacattttagccgaaatattaagataatataaataaggcttttagcttcatatcaagacctatttgaacacttctagaaaagaacattaaaagttttttcctcatttatggtttgatttagtgtagtgcctcaactgttcttaatggtgtcttagtataatgcataattattagaatataattataaggcattacagaattttatgtggatacttgcaaagatatttcagtccaaaacttcaaattacacacccaaatatgtttgttgccttaatctatacttggacaaaggcaacattttaatttttgctaagtcttaactttagccagatggattgaaatttaaaattttcat

SEQ ID NO: 774 - DNA, 295 bp, Homo sapiens
actctgagccttctcctcgggttggtctaggtggatatcttctcctgaccaaaaactgataggagtcaaatattttcacggtcaaagcagcttctgcttttctaccaaggctcttccaaaacttctgggaatggataacgatgttttctggttctacttcaccctgagcacaagggaacctggtccttgaatgaacctgcactcaaaaaatcaaactaaacaccggatagtttagattggcataaatgcaaatcagagtgttgggctttgcttgtatttgctgacatgctatagt

SEQ ID NO: 775 - DNA, 195 bp, Homo sapiens; identical to SEQ ID NO: 8

SEQ ID NO: 776 - DNA, 262 bp, Homo sapiens
  misc_feature 80, 114, 134, 175, 181, 225: n = A,T,C or G
gggcaggtcttttttttttttttttttttttttttttttttactttttttttggccgcaaaccacaagtgtttattgcanaaatctggccaacattccaattgcagggccccancacagggctgggcaggtganatagggaggggtggaggaagtaatctggcccagggcctcanagctgngaaatgatattgggtgccaggctgcaggtgaggcctgtgccatntggttccacattcagggccttcactatgccatcctgt

SEQ ID NO: 777 - DNA, 267 bp, Homo sapiens
actatctgtgaagttacactttttttttttttttaaaggtagagatgtgtgtgtgtgtaggtattaaagatgtgttgttggtttccaaaaaggaacactggaaaataaattttgaatgtttatgttctcagaatcaggttgacagtcccttgctgacatggctttgctttgtgtaaatacagtggatctcaatcttcggggtgtgatgaatagcgaatcatctcaaatccttgagcactcagtctagtgaagatgttgtcattatgt

SEQ ID NO: 778 - DNA, 452 bp, Homo sapiens
  misc_feature 395: n = A,T,C or G
accattcacatcctcaaaaattcccaactcttagaaattatcatatattggcaagttcatatgattcaacctaatagcttctacctcacaggattattgtgagaattaaatgagaaatgcatgaaatgtttggcacacaggctcatagtaagtgctcaataaatggtggatattattattcttaaatgaatcatgtaattattttctatataataatcaaactcaatcccacttatttgcaacttctgtatcaagttttaagtccaatctatttactggaatacaatgatttagcacacattgatttttcccataaacattcatatgcaatgattgctcactaaaatgcaaaaagggtgaggatacaatatgtgtttttattgtttttggatttngcttctttcacttagcatgtttttcgaaagttcatctctgttatagcatgtatcagt

SEQ ID NO: 779 - DNA, 175 bp, Homo sapiens
  misc_feature 142: n = A,T,C or G
caagcttttttttttttttttttttttttttggctctagagggggtgctatagggtaaatacgggccctatttcaaagatttttaggggaattaattctaggacgatgggcatgaaactgtggtttgctccacagatttcanagcattgaccgtagtatacccccggtcgtgtag

SEQ ID NO: 780 - DNA, 152 bp, Homo sapiens
acggatgctacttgtccaatgatggtaaaagggtagcttactggttgtcctccgattcaggttagaatgaggaggtctgcggctaggagtcaataaagtgattggcttagtgggcgaaatgttatgctttgttgtttggatatatggaggat

SEQ ID NO: 781 - DNA, 557 bp, Homo sapiens
  misc_feature 45, 46, 113, 133, 463, 472, 551: n = A,T,C or G
acactgtggtagcatagagtgtggcttgtggcctgtgactttcanngttgtggttaatcttattgctaaaatgcaaacattggctttttttttccccctcaaagtcagcctangtcaggggagcaagctgcanaactgggtaatgtaagttcaaatgatgaggtgatggaagggctctaggacaaggacattccagagcagagggatgtggacagacaagcagaaggttgtctggaggaatccggaggggaagtcctgatgaaagactttgtgtggtccttcataaggctgttgggtgttcagggaaagaaggccgagccatcctactgagctgcacagagagggcatagagcagccctctgggactgagccattagcagtgtgcagactctttgtgtgtagccagagaaaaccatccggagttcctagggcatatttttctgtcctgattgttttgttttgnttttttttnccaccacagaaggtgctgattttaccatatctttttcatcttttcaaaagttttaaaatatagaacatggggtttctcnctaaga

SEQ ID NO: 782 - DNA, 500 bp, Homo sapiens
  misc_feature 446: n = A,T,C or G
actaaaaatatacaagtattgtgctgggtattttggcacctaatcttcctaaatttcttatgtattgataagattctggcatgggaatagatttaacaagtcataactcaatactgcatgatttggggaaaggtcaattgatacaaatgacaagcacattttatatgctgacagcaagaatcttttgccaagtatccaaataggttgactgtaacccaaatacagaggttgccaaatctgtctagcttgaggcctggtaaaactgcctttcaatactcctatggaagcttcattagacttactaagccaacatgttggctaatatgtataacaaattaggccctatctcaagttccacttccagtagcattaggcaccccaattttattgaatgcaacagttgtttctatgaccgttggaatctttgaaacgcagccgcattttangacgatacttctccaaatacagaagttgcttgctgttaaaagctccacgccgct

SEQ ID NO: 783 - DNA, 603 bp, Homo sapiens
  misc_feature 536: n = A,T,C or G
actcctggcagccagctgtggcccgtgaactgacttctaccgtctgtgaagcctcagaccctcgctgcatgccctatagccttgagtcgcagccagagagccagccctgcttgttgtcttggaggccagtgctactggagagattgtgtctttgcttggcctggaaccagatgtttggaggctttatttagcctctcaactctgtggaggaccaggcctgagctggccacgccttatctctagacactgttcctaccagagtgacctgacgtctttggtttggcggcttcaagctgccacactgtcagcctagcagattgtgcaggatgctgaggataaacgaacccaccaggactgcatttcacaagttctggctgggaggaagtgaggacaggcagcttcccggtgctggagacaggtaggcagcgtggcagaggctgtgggacctggaactctttagagaactcgctccggagcattctaggcatgtgggcacctctccttcaccttcgtattccccagtgcctggctccccngtgggaatgggtgagtgagtggtgagcctggttttttgatgagacaagagacgccctgcaaagactg

SEQ ID NO: 784 - DNA, 382 bp, Homo sapiens
acctctttgcatggtgggtgggaaaatagtaaatactgtaaatactttgtgttgcctctgtggtagaaccttgatataaagatctacaaatggacagggcagaggccactaattccttgaccttgaggtgagcctctccccagcgaccaaaatgtgaggacagttaataccttacttgatacaccgtgaaagggacgaaaagtgaccacagcagttctgagacccaggaggcatctgacaccgtctgaggggagggcatgagatgaggcctaagccagggccagggatgggaaatttccccttcaagccccagagattccctgttcaacacacactcaccacagagaccaggggtctctgaacttgcagggtaagaggttgt

SEQ ID NO: 785 - DNA, 394 bp, Homo sapiens
acaagcatctgagtgctttacaaattcaaatgtatttaatccccctatcaacactaggaggtagtttctgttattagcgccattttacaaatgaggaaactgaggtgtagagcagttagattggtgtagagaagctagatcgtgtgctcaaggcttcagtccaggctcttggccctgacacgatgctgtttgcctgttgaagatgtgtgtgcatgcatgcaccattcacactgtgaacgtgtcccagcatggccacaccccctcaccgtatacacatatggccatgagcactcaatctcaaggtcatggatgcacatgcctcacacctatgcatggaaggacactcggcacacatacttgtctctgcacacacacaccacttgcacacccatgt

SEQ ID NO: 786 - DNA, 200 bp, Homo sapiens
caggtaccattggtggccaattgatttgatggtaagggagggatcgttgacctcgtctgttatgtaaaggatgcgtagggatgggagggcgatgaggactaggatgatggcgggcaggatagttcagacggtttctatttcctgagcgtctgagatgttagtattagttagttttgttgtgagtgttaggaaaagggcgt

SEQ ID NO: 787 - DNA, 249 bp, Homo sapiens
acaggagatacggcttatctttgttctcccccatgccacagtaggccccagtagagttcctggggtagaggacttgccgggggtctccatacaaccaggccacaatccccaccacgatgtaacctagaatgaagagcaggaagaggacgcagcagatgacatctgtgcagcttctgttcttgatggggcctcgaaaggaggggtcgtatttgactggcttcccgtaggcctcgtcatcctcgtcccgct

SEQ ID NO: 788 - DNA, 516 bp, Homo sapiens
  misc_feature 407, 435, 452, 469: n = A,T,C or G
aaaaactacacattctcagaagctcttgatgtctctaatgaagggggggaatgctgttaatgagaacagtcataaatttttagcatataattacaagaacagcctgtggatatgatcacttaaatgattttgtggtgattcgtgccattgcttttttatttaaaagaaaattttgtaattaaatgcctttttctaaattatcttctcttggaatcattacttttaatcctatgtgtttatgagtatttttgctttttttttattaatattgagaaatggacttttttgttattaaaagtcacctctattttctattttctttgtaatttttaaagtaggaagatgtcagagatgtaaatatgttttcgtctttagtttttttccttttacaaatttttattcttcangattttcaaaatacagttttagttctgnttcttttgacaatatgntattaattttccaattngcaaaatggtacatggtggttgccgcccgacagcaccgtgttggcgt

SEQ ID NO: 789 - DNA, 179 bp, Homo sapiens
acagtggggaggtggaaggagagtcagaagtcaccaaaatgtataactatccaagctcaagagcagctgggctgagtctccactcacctctttctctgtattactcccataaccattactaatgtgtccactttctttactgacacaggtgctgggactgggggtggtgaaggatatgt

SEQ ID NO: 790 - DNA, 198 bp, Homo sapiens
  misc_feature 16: n = A,T,C or G
gcggcgggctctgganaagattgaccttaagttcattgacaccacctccaagtttggccatggccgcttccagaccatggaggagaagaaagcattcatgggaccactgaagaaagaccgaattgcaaaggaagaaggagcttaatgccaggaacagattttgcagttggtggggtctcaataaaagttattttccac

SEQ ID NO: 791 - DNA, 164 bp, Homo sapiens
acctggccctcttttccattattaatattgttttgttttattgttcattgcagaaattgaagtattaaaatatcttattataataatattgctttctatttgttgctttaattctgtcaatttttgctttgtattttaggaaacctaatatgagaaatatatgt

SEQ ID NO: 792 - DNA, 464 bp, Homo sapiens
  misc_feature 426: n = A,T,C or G
actttggtaaataaaaaataaaatggttcagatgaacacaatccgtggaaagaaacaatctagggggaaggaactatggacatcagacaatggtcacaattctcaccatcgagctccatagataaggcaagacttgctaagtctatggatcacgaccccatggaggtcttaagtatctccagactgaagctagaacaagtatagtgcaattagaaagagagaaagcccctcctccacggatacatccacccctctgtaaaggagactgacgcatgccaacacttctacatgggaaaggggagccccggggtgtgacgtctgactcctggcccttttcttctttcctctgagcttagtgctggtggaggctctggaagaggcactggggaggccaagggcccttcctactatgaaaaatgaactgtnagagtgggaaaatgtgtgaagcctcttaccagtacctc

SEQ ID NO: 793 - DNA, 558 bp, Homo sapiens
  misc_feature 486: n = A,T,C or G
acaggggaatggaatggaatggaatgcaatggaatggaatcatccgtaatggaatggaaaggaatggaatggaatggaatggaatggaatggaatggaatggaatcaactcgattgcaatcgaatggaatggaatggaattaacccgaatagaatggaatggaatggaatggaacggaacggaatggaatggaatggaatggaatggaacggaatggaatggaatggaatggaatggtatcaacgcgagtgcaggggaaaggaaaggaatggaatgcaatggaatggaatcttctggaatggaatggaatggaatggaatggaatgatacggaatagaatggaatggatcgaaatggaatggaatggaatggaatggaatggaatggaatggaatcgttccgagtggaataggagggaatgtattcgagtggaatgaaaggaatggaatcaaccagagtggaatggaagggaatggaatggaatgnaaaataataggaatggaatcaacccgagtgaatggaatggaaaggactggaatggaatggatggatggaatg

SEQ ID NO: 794 - DNA, 271 bp, Homo sapiens
cgcaagtaggtctacaagacgctacttcccctatcatagaagagcttatcacctttcatgatcacgccctcataatcattttccttatctgcttcctagtcctgtatgcccttttcctaacactcacaacaaaacaaaaaaaaaaaaaaaaaaaaaacccgggggctggggaagcaaggaaataagtcatctgtatgctgactggggataatggcatcaaatgtcagtccttgacatttggggggaacagcaggtgccagagctaaaaggt

SEQ ID NO: 795 - DNA, 181 bp, Homo sapiens
cctgtttccattcaacaagagcactacattcatttagctaaacggattccaaagagtagaattgcattgaccgcgactaatttcaaaatgctttttattattattattttttagacagtctcactttgtcgcccaggccggagtgcagtggtgcgatctcagatcagtgtacctgcccgga

SEQ ID NO: 796 - DNA, 497 bp, Homo sapiens
  misc_feature 189, 190, 451, 460, 481: n = A,T,C or G
actttaaaatgtgagtttgagttcttctttgtggaaacttaagatgtggtgtaaatgattctttccaaaattgtccagcagcttgaatgaggcagtgacaattctgaggtggtttattgggagtccttctacatttctcttagataactctgcactctgggtggctattgtgtagccttactgccccanngtgcctgttagccaaatatttcccctctgataggaatattttctaagaatcagctgataacttgcgtgctggaccttgttatctgtgcccctgggagacacacgttttcttggttttgaaaacctgaaacacaggcaactttacattttggggaattagctgatgcctcctgaagcctgaggaggtggcggggaatatgagcggtgctgtctctctcaaaagtgccctttagatgattccccctcctagggctgcctgcangggctgtangcttgggaaagattgtgtaangtgacagtgaatcaga

SEQ ID NO: 797 - DNA, 551 bp, Homo sapiens
accaccagcaatctctgcatttaagtggtcagagagcactcctaataaacttgattctactgggaaaggttcataaagaaattttttataaaagtctttctttatgtcatgaactagaattacagctttgccttggtcatcgaactgcggcctcccagcacgccccatcatctggaggacatctgtaatgggaaaatccacataacgtcttgtttttccatcatagtattctgttcccttaataattactaaatgagctggaaagtttacaccccaggctaatgtgcttgtagcaataagaacctgaactttacagtttacaaatagttcctctactgtttttcggtccctctcatgtagtccagcatgatgcattcctatcccgaaagtaagggtcagcttgaggttggaatctcttactgttgcaatgatgttctccatctctctttcatccatgtttaaccactgctttggatcttcttcagtagccaggaaggcgatcaattccaaagcagtaagacgagtttgacgtcttgatgagacaaatatca

SEQ ID NO: 798 - DNA, 326 bp, Homo sapiens
accagcccaccgggggacagctgctgttggatgggaagccccttccccaatatgagcaccgctacctgcacaggcaggtggctgcagtgggacaagagccacaggtatttggaagaagtcttcaagaaaatattgcctatggcctgacccagaagccaactatggaggaaatcacagctgctgcagtaaagtctggggcccatagtttcatctctggactccctcagggctatgacacagaggtagacgaggctgggagccagctgtcagggggtcagcgacaggcagtggcgttggcccgagcattgatccggaacccgtgtgta

SEQ ID NO: 799 - DNA, 346 bp, Homo sapiens
acctctgcatacagatatattataaaacacaagcaatgttatttatgaaactgtgatgcagtcttcaacatcaagaaaaaatgacaactataataaaatttacaacacagtttcacagtctaaatgctatgttcctttaagtattttcatatttttaatcatttattaagagaaaattgtgaaaagttaatttggccttatagagagattcaggatagatgtagcctatagatgtgtcattttaataagttgggatacatgtttagtttttccttatattcctgttcagtgaacagattttcataattctcacttgttaaagtgctgcaaaaattgcattttcagt

SEQ ID NO: 800 - DNA, 502 bp, Homo sapiens
acctgtgggtttattacctatgggtttatatcctcaaatacgacattctagtcaaagtcttggtaatataaccaatgttttcaaatgtattctgtcatacaaagagcagatttttattgaacttgtgcaataactatattaccatacaatataaatattcatgaatagtttcccaagtctggagcgaccacatagggagaaaatgtaaatgtctcaatttttgttcacaaaagtatattttatcaaattgctgtaagctgtggatagcttaaaagaaaaaaaagtttcctgaaatctgggaaacaagacatttaaagaatcagcaaaatttcaaataaaaaattataaaaatattatcctcattagttcatttagtcccatgaaattaattattttctctgcttgatcttggtggacagtttcatgaagctgtcagttagttcattaaagttttggaaattctcagacagtgcagtggtatcagaaacttgtattcaagagt

SEQ ID NO: 801 - DNA, 537 bp, Homo sapiens
  misc_feature 451: n = A,T,C or G
actgtgatgtccaatctaccacacagggcttcaccaagccaaagcagccacactgaaagaaatctgccaggttctgcatgaatccaagattgtatggtgtcttcctgagggacaacgtctgtttcatatgcttgctctgcttctgcaggctgattctctcatgggaggtcaggcccagaaaggcaatctgaaagagttgatttaataataaaaatgttgaccatgagaaatggaaagttgctagcatcaagatatataaaacccaaggggaacaggccacaatctgattgaggtaagtccataatccatcttctttgaatgttgtggcacaatgactggacaaatagatgaaagatccatatataatccagccacataccatggaaaggaaaaacaagaagaatatgtaatagtgatggttgccaaaacctatgcaccgtccagtccacangcagtgttgatcatatcgagccacacagcagttgcatacatggcaggtggagtgaccttaatggcttccttataaagacatgatgt

SEQ ID NO: 802 - DNA, 399 bp, Homo sapiens
acattacaaatctctgaggccattaggggaaaaggaaggggtgtggtttgtctttgaaattacggttaatacttttagacagtaagtccggctggttgcagggctatttgccccgacagcatcagcctgtaacatttcttctctttcctttgtgccactgagtcgttccctggccagaggacataaatggtgctggtaggaggttatcagagtaaggaaggtagcagatataggtgcagggtgcctgtcattcactgtgttatttggtttaaatcaaagtgattctgggggaagctatgctctttcagtggataataaaattggtaactctattgtaaaacatgtcaatggtgtgtgaagaaaaatcaaccaatctgtaggtgttgataactagacagt

SEQ ID NO: 803 - DNA, 250 bp, Homo sapiens
  misc_feature 176, 177, 223: n = A,T,C or G
actgccaggggacagtgctgtgtcagttgaacctgggctgctgtgggaagttgttgattcctgactggggcctgaggtggtggtgctggcaggtaacagtgttgtatccgttgagcctgggctgctgtgggaagttgtagaatgccgactgaggcctggcgtggtggtgctgtcanngaatgctgttgtgtgcgttgagcctggttcggctgtgggaggtggnggattcttcactgacgcctgagcttgt

SEQ ID NO: 804 - DNA, 451 bp, Homo sapiens
  misc_feature 375, 386, 410, 414, 416, 437: n = A,T,C or G
acaagtcattactcccccttctcccatatgaacaagaattttttaacggtcagaatatattgggcatcaaattaaaaacttttttttcaaaagtctacagaatggatattggagcaaaaattacaaagtgggtcagatacaggtttttaaaaactgcattactgaatttaacaaaagtcagacactagaatcatatatttgctgcataaaagttgatttgatacctggtggtgattgaatttagtctcaaagactcataaataaaaatctgacttaagacgtagtcataccagtataccaattctcccatcactttgactttcggcagagagattagagcaaaaaatattcaggagaacagtggagttacattgnattatgtatgnttaatataatatcaattttaaggntaangntaaggaaatcttaattttaanggtaaaccttgagt

SEQ ID NO: 805 - DNA, 160 bp, Homo sapiens
acattgtatgggcttagacaaatgtatgatgatatctacaattatagaatcatacagaatagtttcactgccctaaaacttctctatgcttcacctgttcatccctttcttccctaatcccctggcaaccactttaaaaaaaaaattaggttcagggggt

SEQ ID NO: 806 - DNA, 276 bp, Homo sapiens
actggcatttctgaatggatgtaagtggagtattttagtctaaaggcttttcaaattacttgaatttttttaaaaattgaggagctttatttctatttacccttccatttttgtatatcaaatttccattgtcattaaaaactgtatcttgaaactttgtgaactgacttgctgtatttgcactttgagctcttgaaataaatgtgatttttgtgtgattatctggtttccagttttaaacattaactgtcaccttttattcttaaacttgaaagt

SEQ ID NO: 807 - DNA, 373 bp, Homo sapiens
ctggaagtcagcttgaaaaacaatgtggtgagtgtcaacaaggagcctgttgccgagcctgacatcatggccacaaatggcgtggtccatgtcatcaccaatgttctgcagcctccagccaacagacctcaggaaagaggggatgaacttgcagactctgcgcttgagatcttcaaacaagcatcagcgttttccagggcttcccagaggtctgtgcgactagcccctgtctatcaaaagttattagagaggatgaagcattagcttgaagcactacaggaggaatgcaccacggcagctctccgccaatttctctcagatttccacagagactgtttgaatgttttcaaaaccaagtatcacactttaatgt

SEQ ID NO: 808 - DNA, 266 bp, Homo sapiens
ggttaggattcggcgctaggaggtgaaggcgttgtgtgagttgaggctgggcgggtctggaaggcagtagattctccctgaagtccagggcttgtggagctggcaggggacagtgttgtgcgtggtgagccagtgctgctgtggacgcgtgtagatgcttcaacgatgcctgagcttgtggtgctgtcagggaagagtgttgtgtgagtggagcctgggttgctgtggaaggttgtagattcttgaccaaaggataaggctgtggt

SEQ ID NO: 809 - DNA, 569 bp, Homo sapiens
  misc_feature 525: n = A,T,C or G
gtgaatgagcggctgatcagcatggcctatgggcagattggaatgatccaggccctgggaggcttctttacttactttgtgattctggctgagaacggcttcctcccaattcacctgttgggcctccgagtgggctgggatgaccgctggatcaacgatgtggaagacagctacgggcagcagtggacctatgagcagaggaaaatcgtggagttcacctgccacacagccttcttcgtcagtatcgtggtggtgcagtgggccgacttggtcatctgtaagaccaggaggaattcggtcttccagcaggggatgaagaacaagatcttgatatttggcctctttgaagagacagccctggctgctttcctttcctactgccctggaatgggtgttgctcttaggatgtatcccctcaaacctacctggtggttctgtgccttcccctactctcttctcatcttcgtatatgacgaagtcagaaaactcatcatcaggcgacgccctggcggctgggtggagaangaaacctactattagccccccgtcctgcacgccgtggagcatca

SEQ ID NO: 810 - DNA, 195 bp, Homo sapiens; identical to SEQ ID NO: 8

SEQ ID NO: 811 - DNA, 298 bp, Homo sapiens
accatcttcttcagaactgcatctaagaggctgtgctggctgggaatcatacagctgtgggcaacaactgcatcagccccaaggcttccctccagaccaaaaggtgattcatggcccctggttaatatcaccctaggttctcccctgtcccagttttaacataatatttcatagaaatactagtgccataaaaagtcaatatttcaaatataaaaattattttatacaaatgtaattcataatcattcttttaaaatacagcattgttatatatgtttgaaacattattaaaataaat

SEQ ID NO: 812 - DNA, 515 bp, Homo sapiens
  misc_feature 448: n = A,T,C or G
acatgtgctaatgttctgtaaatccagaaaatcatatcacataagattcaataaggaattaaagaaatcaaattaatcacacttgtgttaactaaataagaataggtcagatacctgtttccaagttatgctgggtatataaaaagcttctctgcaatcatagaaaagtttgaaaaggttcattgatgaaagcaccttgcatttcagatgaacttcaatattttggggcttttttatataagagctttaacaagtatatatgcacctgtatatttgaatagatattgatgaaaggggccatacaggcctcagagtagtgcaccatcagaaatattttaggggatacagtgtcttttaaatttgaatattcaagtatttaagttctacaaagttatatgatacctcctggatgtttcctagaagttctcatattcatagttagaaacangcttttttaaaaaggaaatgccgagtttctcaaatcaaatttcacataacttagagctctatttctg

SEQ ID NO: 813 - DNA, 329 bp, Homo sapiens
gctaaaaaaggatacaaaatggaattacatataatagaatgctcaggtaaacccgcaaaaggtggaagagtatggaaaacagaaataggaatgaagaacaagggcaaaaagtagaaaatggtaacaaatgtggtagatgttaattcagcaacatcagtaatcacctttttaaattttttttttatttttttgagacagtctcactctgtcccccagggtggagtgcagtggcacagtcccagtctattgaaagctttgacctcccaggctcgagtgatcctcccaccacagcctcccaagtagctgggactacaggcacaagccactgt

SEQ ID NO: 814 - DNA, 280 bp, Homo sapiens
cgagcggccgcccggcaggtactgtcccaagtgccggggggagaacgagaagaccatggacaaagccctggagaaatccaaaaaagagagggcttacaacaggtagtttgtggacaggcgcctggtgtgaggaggacaaaataaaccgtgtatttattacattgctgcctttgttgaggtgcaaggagtgtaaaatgtatatttttaaagaatgttagaaaaggaaccattcctttcatagggatggcagtgattctgtttgccttttgttttcattggt

SEQ ID NO: 815 - DNA, 143 bp, Homo sapiens
  misc_feature 15, 113, 114: n = A,T,C or G
acacgctcatccctnctgtagtgatcatagctgtaggagccctgcttttcatcattgggctaattggctgctgtgccacaatccgggaaagtcgctgtggacttgccacgttnntcatcatcctgctcttggtttttgtcaca

SEQ ID NO: 816 - DNA, 191 bp, Homo sapiens
accgcggccgttaaacatgtgtcactgggcaggcggtgcctctaatactggtgatgctagaggtgatgtttttggtaaacaggcggggtaagatttgccgagttccctttacttttttttaacctttccttatgagcatgcctgtgttgggttgacagtgagggtaataatgacttgttggttgattgtag

SEQ ID NO: 817 - DNA, 553 bp, Homo sapiens
actcactattgctgctagtctcagtttcaaagatccatttgtcattccactgggaaaagaaaagattgcagatgcaagaagaaaggaattggcaaaggatactagaagtgatcacttaacagttgtgaatgcgtttgagggctgggaagaggctaggcgacgtggtttcagatacgaaaaggactattgctgggaatattttctgtcttcaaacacactgcagatgctgcataacatgaaaggacagtttgctgagcatcttcttggagctggatttgtaagcagtagaaatcctaaagatccagaatctaatataaattcagataatgagaagataattaaagctgtcatctgtgctggtttatatcccaaagttgctaaaattcgactaaatttgggtaaaaaaagaaaaatggtaaaagtttacacaaaaaccgatggcctggttgctgttcatcctaaatctgttaatgtggagcaaacagactttcactacaactggcttatctatcacctaaagatgagaacaagcagtatatacttgtatgactgc

SEQ ID NO: 818 - DNA, 291 bp, Homo sapiens
  misc_feature 28, 124, 125, 197: n = A,T,C or G
acacctgagcttccatcttggtcctgtngataggaagtagagggatagaggtggggaaagcactcacactgtctctctcctgtctgtgtggggttgttactgccactgtgtcaccccacacagnntggcagttttccagctgttaggggagtgagatcagcttctctcccccttgtagagtggagcggatcgagcanaatgccaccaacaccttcctggtctacaccgaggaggacttgggagacctcttgaagatccagctcacctgggagggggcctctcagtcttggt

SEQ ID NO: 819 - DNA, 411 bp, Homo sapiens
acggccagggctattggttgaatgagtaggctgatggtttcgataataactagtatggggataaggggtgtaggtgtgccctgtggtaagaagtgggctagggcatttttaatcttagagcgaaagcctataatcactgcgcccgctcataaggggatggccatggctaggtttatagatagttgggtggttggtgtaaatgagtgaggcaggagtccgaggaggttagttgtggcaataaaaatgattaaggatactagtataagagatcaggttcgtcctttagtgttgtgtatggctatcatttgttttgaggttagtttgattagtcattgttgggtggtaattagtcggttgttgatgagatatttggaggtggggatcaatagagggggaaatagaatgatcagt

SEQ ID NO: 820 - DNA, 531 bp, Homo sapiens
ctttgacctttttgagaacaagaagaaaaagaacaacatcaaactctatgtccgccgtgtgttcatcatggacagctgtgatgagttgataccagagtatctcaattttatccgtggtgtggttgactctgaggatctgcccctgaacatctcccgagaaatgctccagcagagcaaaatcttgaaagtcattcgcaaaaacattgttaagaagtgccttgagctcttctctgagctggcagaagacaaggagaattacaagaaattctatgaggcattctctaaaaatctcaagcttggaatccacgaagactccactaaccgccgccgcctgtctgagctgctgcgctatcatacctcccagtctggagatgagatgacatctctgtcagagtatgtttctcgcatgaaggagacacagaagtccatctattacatcactggtgagagcaaagagcaggtggccaactcagcttttgtggagcgagtgcggaaacggggcttcgaggtggtatatatgaccgagcccat

SEQ ID NO: 821 - DNA, 402 bp, Homo sapiens
acgacatgtttgtgaatttcccagaccagccggtggtgtggagagaaatcagcattattacatcagcattaaggaacgattcacaggacaaacaaacccaatttttaagaagtttatttgaaactcttcctggtcgagtccagtgtgaaatgttactaaaggtcacggaacaatgcttcaacacgttagaacgatcagaaatgttgcttctacttttgaggcgcttccctgaaacggtggtgcagcatggggttggccttggggaggcactattagaggctgaaactattgaagaacaagaatctccagtgaactgctttagaaaattatttgtttgtgatgtccttcctctaataattaacaaccatgatgttcgattacctgccaatttattgtataagt

SEQ ID NO: 822 - DNA, 195 bp, Homo sapiens
accattggtggccaattgatttgatggtaagggagggatcgttgacctcgtctgttatgtaaaggatgcgtagggatgggagggcgatgaggactaggatgatggcgggcaggatagttcagacggtttctatttcctgagcgtctgaggtgttagtattagttagttttgttgtgagtgttaggaaaagggcgt

SEQ ID NO: 823 - DNA, 195 bp, Homo sapiens; identical to SEQ ID NO: 8

SEQ ID NO: 824 - DNA, 231 bp, Homo sapiens
  misc_feature 188: n = A,T,C or G
acggatgctacttgtccaatgatggtaaaagggtagcttactggttgtcctccgattcaggttagaatgaggaggtctgcggctaggagtcaataaagtgattggcttagtgggcgaaatattatgctttgttgtttggatatatggaggatggggattattgctaggatgaggatggatagtaatanggcaaggacgcctcctagtttgttagggacggatcggagaaac

SEQ ID NO: 825 - DNA, 431 bp, Homo sapiens
  misc_feature 13, 386: n = A,T,C or G
acaaaaggttganattgggcaaaagagagccagtgaagatacaacttcaggttcaccacccaagaaatcttcagcaggaccaaaaagagatgccaggcagatttataaccctcccagtgggaaatatagcagcaatttgggcaactttaattatgagaggagccttcaggggaagtagaggtggccgaggttggggcacacgaggaaatcgtagtcggggaagactctactgaataagacatcagcattcttcagcattgtcatgagcttaatatacttaaattctactactcattggattgccggggatgtccctttaaacagactgctgccttcagctaaaaacttaatgttctttatacctttgtatgtatgacctacttttngtaacagaccatggttgtgtccaaggtaaaaaccacagtgatatt

SEQ ID NO: 826 - DNA, 346 bp, Homo sapiens
  misc_feature 13, 14: n = A,T,C or G
accagttacccanntgaaaatatggagtaactttgttttgtatggtaaggtttaggaatggtggatggagggtatctctatataaataaagtgctcaacaatgtgcaatgattgtaaatttagtaagatattacagccatttcatgaatgctttaccattcaacatagtatctattacaaaacacctttcctgtatccatatacttcaggtgttgctgttaacatttactatgatatttattttaaccaaaatgttactcacattaaatgtttattctttaaaatgaatgtattatgtttttaacccacaaatgcatacttaccctgtgcctcatatttcaatagt

SEQ ID NO: 827 - DNA, 195 bp, Homo sapiens; identical to SEQ ID NO: 8

SEQ ID NO: 828 - DNA, 251 bp, Homo sapiens
gaaattcttagtgatccagaggttcttgcagccatgcaggatccagaagttatggtggctttccaggatgtggctcagaacccagcaaatatgtcaaaataccagagcaacccaaaggttatgaatctcatcagtaaattgtcagccaaatttggaggtcaagcgtaatgtccttctgataaataaagcccttgctgaaggaaaagcaacctagatcaccttatggatgtcgcaataatacaaaccagtgt

SEQ ID NO: 829 - DNA, 418 bp, Homo sapiens
acagtgatagctccccctgggcaatacaatacaagaacagtgggttttgtcaaattggaacaaggaaacagaaccacagaaataaatacattggttaacatcagattagttcaggttacttttttgtaaaagttaaagtagaggggacttctgtattatgctaactcaagtagactggaatctcctgtgttctttttttttttaaattggttttaattttttttaattggatctatcttcttccttaacatttcagttggagtatgtagcatttagcaccactggctcaatgcgctcacctaggtgagagtgtgaccaaatcttaaagcattagtgctattatcagttaccaccatttggggcttttatccttcatgggttatgatgttctcctgatgacacatttctctgagtttta

SEQ ID NO: 830 - DNA, 520 bp, Homo sapiens
  misc_feature 389, 402: n = A,T,C or G
acaaaactcaaatagatgaacttttaagacaaagtctcagttaacttgtgaaaattgaattcccatcaaactgaatgtaagcatttaatatctaaacatttaatgtggacttccaataaattcttttatagaattagaaagtgggatttactgtagagtgtaaaaatttttttaaaattgttttacactatgtagtaatatttacagttaaattattttgtgcaatatttgaactttatttttgaaactattctttaaagatttattttttaaagcattcattttttttccttgaatagcacagagatttattactttatcctcatataaatatggctagagaagaagaatggtgttcatatatgtattgtagatatacaactagttgnatctataatttgnaagtgtttatatatatattaagaacatttgaagagtaatgttaacatactgaaactttgaaatctttcacatttaaaatttcaacatatcttaattactgctcatgaaaatgtacctc

SEQ ID NO: 831 - DNA, 568 bp, Homo sapiens
acagttcacatgacaagtcgtatttcagttcaaacgtgttggcgcttttcatcaaatttgataagaatatgctgttttctactatgttcataatgaaatgaatggggaagaaaagggactagcctttctctagggaggtagttttgtgcatggctttgcttttatcagttttaatactaggctgaaaagccaaaatgaaaaattttttattatttttatttctatgcatttagagtttcaacatggagattctaaatcctatactgatacattttaaggaagaaatacacaattgcacctttgtataatctttatacatacaatgtaaacatgatgctacagagtaagctgtgttgaaaattaaaacccttcacagaagagtgatgtgtattaagccgtcaggatgccatttaatggcaggcatctccacaggtaggtcaacttctccaggctactagaatgtttcagtggcattcaatcaacccaaagatgtaatgtgtgactcatgaagctttcttttcatggtggaaagctctgctgtcaagtgtttcacagcaaaaatattcag

SEQ ID NO: 832 - DNA, 473 bp, Homo sapiens
acttatttcaacaattcttagagatgctagctagtgttgaagctaaaaatagctttatttatgttgaattgtgatttttttatgccaaattttttttagttctaatcattgatgatagcttggaaataaataattatgccatggcatttgacagttcattattcctataagaattaaattgagtttagagagaatggtggtgttgagctgattattaacagttactgaaatcaaatatttatttgttacattattccatttgtattttaggtttccttttacattctttttatatgcattctgacattacatattttttaagactatggaaataatttaaagatttaagctctggtggatgattatctgctaagtaagtctgaaaatgtaatattttgataatactgtaatatacctgtcacacaaatgcttttctaatgttttaaccttgagtattgcagttgctgctttgt

SEQ ID NO: 833 - DNA, 388 bp, Homo sapiens
actctataaatctagtggaaacatttctgcacaaactagattctggacaccagtgtgcggaaatgcttctgctacatttttagggtttgcctacattttttgggctctggataaggaattaaaggagtgcagcaataactgcactgtctaaaagtttgtgcttattttcttgtaaatttgaatattgcatattgaaatttttgtttatgatctatgaatgtttttctcaaaatttacaaagctttgtaaattagattttctttaataaaatgccatttgtgcaagatttctcaaagattaggtatatatttaaatggaagagaaaatatttttatgggagaaaaatacatttgaaccatgaaatttcatcttttaaataacatccagt

SEQ ID NO: 834 - DNA, 195 bp, Homo sapiens; identical to SEQ ID NO: 8

SEQ ID NO: 835 - DNA, 472 bp, Homo sapiens
actcttggtttgtcaatgggactttccagcaatccacccaagagctctttatccccaacatcactgtgaataatagtggatcctatacgtgccaagcccataactcagacactggcctcaataggaccacagtcacgacgatcacagtctatgcagagccacccaaacccttcatcaccagcaacaactccaaccccatggaggatgaggatgctgtagccttaacctgtgaacctgagattcagaacacaacctacctgtggtgggtaaacaatcagagcctcccggtcagtcccaggctgcagctgtccaatgacaacaggaccctcactctactcagtgtcacaaggaatgatgtaggaccctatgagtgtggagattgcagtgagcccagatcgcaccactgcactccagtctggcaacagagcaagactccatctcaaaaagaaaagaaaagaagactctgacctgt

SEQ ID NO: 836 - DNA, 340 bp, Homo sapiens
  misc_feature 296, 323: n = A,T,C or G
actgagattgtccatggcattcataactgtcttcctaaaaacaaagcaatggctcaccaacgagccagccttcatgcttacatgtgacactgtaagtggaagtttagaaggatgtcctgacattaaaaagtagcctatcatcagattccagagctgaacagctgtgtttttctgtcagattttgattgttttggccttgcttgggaaaacctgcaggagtattgtatttttggcattgtagagcatttgagtagttggttcctttaaaaaggctttgaatactgtcctaaaaactnatccctaccactcacaagaaccaaagntttacctggctaatagt

SEQ ID NO: 837 - DNA, 473 bp, Homo sapiens
  misc_feature 19, 111, 113, 237, 238, 276, 340, 341, 342, 445, 449: n = A,T,C or G
atttgttttcacagcaatnaatcttcagttctttgtttatgattccacttaacaaaaggcctgcagaagtgatttattatttgggtatttggagataatacatttgatggntntttggaaaacctttttcactccatactcagatatgcttcattgtcaaatgcatatttagattagattattgaattgtaatgtttatctgctgctttttttaaataaaatttgactgaaaatgtnnaattggcattttttaatgacttagccaaagaagtgcanctattattccatattaataggcttgcatttgcttttcctaaatcttatttaggctaaatcagtnnntatttttctctgattttttttaataccacagaatcacctgagtgtcaattgaaagtttgtcaattaaaaggtaacctttttaatctcgtaggaggaatctcantaanacatttttcctgatatgtagagca

SEQ ID NO: 838 - DNA, 205 bp, Homo sapiens
actgcggcgggtaggcctaggactgtgggggcaatgaatgaagcgaacagattttcgttcattttggttctcggggtttgttataattttttatttttatgggctttggtgagggaggtaagtggtagcttgtgtttaatatttttagttgggtgatgagaaatagtgtaaggagtatgggggtaattatggtgggccatacggt

SEQ ID NO: 839 - DNA, 167 bp, Homo sapiens
accaggaagttcattctcaattcccttcgaacgcagagattctgcagacatttaaaagcccaatgctgttcccaagcaagaggcagcacctgacaacaatgctgcatttaatggagcaggattacagtaacattggatattcataaagaagatttttaaagtacctg

SEQ ID NO: 840 - DNA, 332 bp, Homo sapiens
  misc_feature 16, 123, 126, 153, 210: n = A,T,C or G
cttggccccattgtanattgccctgtgcagtaaactttcaaggtgtcggctgccccagattgcttcatttgctgggtgtggaaagagttgctatggccaggcatatgggatttggaagctcancanaagtgacttctgctctgtggttgctgntccccggctttcacagacatggtatggcagccattcttttatctatttaaccaagangatgctggggaattgtgctgcttgtcctgttggctggtggctgcattatgtcctggggtgtgcatgtgggtctatttagagcttctgtcccttccttcccattgcaagttgcacccagatga

SEQ ID NO: 841 - DNA, 195 bp, Homo sapiens; identical to SEQ ID NO: 8

SEQ ID NO: 842 - DNA, 501 bp, Homo sapiens
  misc_feature 431, 481: n = A,T,C or G
acctgtgggtttattacctatgggtttatatcctcaaatacgacattctagtcaaagtcttggtaatataaccaatgttttcaaatgtattctgtcatacaaagagcagatttttattgaacttgtgcaataactatattaccatacaatataaatattcatgaatagtttcccaagtctggagcgaccacatagggagaaaatgtaaatgtctcaatttttgttcacaaaagtatattttatcaaattgctgtaagctgtggatagcttaaaagaaaaaaagtttcctgaaatctgggaaacaagacatttaaagaatcagcaaaatttcaaataaaaaattatgaaaatattatcctcattagttcatttagtcccatgaaattaattattttctctgcttgatcttggtggacagtttcatgaagctntcagttagttcattaaagttttggaaattctcagacagtgcagtggtatnagaaacttgtattcaagagt

SEQ ID NO: 843 - DNA, 388 bp, Homo sapiens
  misc_feature 13, 14, 340, 364: n = A,T,C or G
acacatttttgtnngaacatctattttcagttctcttgggtatatacctaggtgtagaattgctcgctcatatggtaatctgtgtttaactttttgaggaagtgccaaattgttttccacagtggctgccccattttacattcccactgacagcatataagggttcctatttcttcacatcctcaccaacacttgctcttttactttttctttcttaatttttttaaatttttttttgaggcaggatcttgctgtgttgcccaagctggaatgcagtggtgcaatcatggctcactgcagcctcagcctcccaggctccgggtgatcctcccacctcagncatctcaagtagctgggactacanggcacatgccaccatgcctggcta

SEQ ID NO: 844 - DNA, 178 bp, Homo sapiens
acttcaaaaaagtaaaagtaggattaaaaccaatgttaaagtgaatacttccaaatcacttaaggggttaaaaggcagaatttggggcctatatatttttctctttaagacaaaaggatccaaaaaaccttcatattgtaagcaggaaaaaagaaatcagttcccaatgacacctggt

SEQ ID NO: 845 - DNA, 270 bp, Homo sapiens
  misc_feature 202, 203: n = A,T,C or G
accacagggaactggagggtaaatcactgatgcaccacaatggcaggttaattcatcaaaactggcttgccagcatgtctggcagtttccacgatgacaaggttcttcacacctatgaaggccacaacggagtttcctcccacaaatcaaaggacacttgtgctccttatccacacagcatatctcattacatttatgccgnncacacaaccgtttcttgttacaccgcttgtcacacataaatgtagcatcttcacttttgagactggt

SEQ ID NO: 846 - DNA, 549 bp, Homo sapiens
acgagacagaacgatggcagacctgcatactgcacgcttggaaaacgagaaagtgaaaaagcagttagctgatgcagtggcagaacttaaactaaatgctatgaaaaaagatcaggacaagactgatacactggaacacgaactaagaagagaagttgaagatctgaaactccgtcttcagatggctgcagaccattataaagaaaaatttaaggaatgccaaaggctccaaaaacaaataaacaaactttcagatcaatcagctaataataataatgtcttcacaaagaaaacggggaatcagcagaaagtgaatgatgcttcagtaaacacagacccagccacttctgcctctactgtagatgtaaagccatcaccttctgcagcagaggcagattttgacatagtaacaaaggggcaagtctgtgaaatgaccaaagaaattgctgacaaaacagaaaagtataataaatgtaaacaactcttgcaggatgagaaagcaaaatgcaataaatatgctgatgaacttgcaaaaatggagctgaaatg

SEQ ID NO: 847 - DNA, 411 bp, Homo sapiens
  misc_feature 184, 239, 240, 251, 361, 375, 386: n = A,T,C or G
acccgagcgccttcccctcacctcaaccagagaagagcatccggttgctttttaaagcttttagcctgccctagcaaggacaaagcatgttagattagagatgcttctgctgatcgcaggggttcttatttgaaaacatctatgatgggggtggggtgggaggagacaggttgtggttatgcangaaaatcttgtcctaaaaatatatgagtttgggggtaaggggtgggatagccaannaaaatcaggtnattattttaaaatgaacatatgtatttttattaacttttagttaaatacagattttacaacgaggtcagcataagcctaaatctatatagagggctaactcaggcaattntcttgtttatttgnagactggattnaaaacaacctgtcctgttttgtcag

SEQ ID NO: 848 - DNA, 277 bp, Homo sapiens
  misc_feature 229: n = A,T,C or G
accggagatcgaccactgactgagccaccctctccgtagggttctttctcgaggactctaccctcctcccccacgtcctgtctcagctgcagtcgtaagtccgtgcaccatccttgacgttttgctgccacctctgtccacattcttcttggatttgtataaaagaatctttttttaccttgatgtagaatcatggtggaaaaagttggaaacacagatctgtgcagtntctacattcactgattattacagtgtgattttcatcggttttgtaagt

SEQ ID NO: 849 - DNA, 445 bp, Homo sapiens
gtctttggccagatgtgccgttagagtgcatagtatccctgggcactggacgttatgagagtgatgtgagaaacacggtaacatacacaagcttgaaaactaaactttctaatgttatcaacagtgctacagatacagaagaagtccatataatgcttgatggcctgttacctcctgacacctattttagattcaatcctgtaatgtgtgaaaacatacctctagatgaaagtcgaaatgaaaagctggatcagctgcagttggaagggttgaaatacatagaaagaaatgaacaaaaaatgaaaaaagttgcaaaaatattaagtcaagaaaaaacaactctgcagaaaattaatgattggataaaattaaaaactgatatgtatgaaggacttccattcttttcaaaattgtgatgagtatatgcttatgttctcataaatga

SEQ ID NO: 850 - DNA, 288 bp, Homo sapiens
acaatgtttataaacttgtttttcttttcaaaatcatcagattttcagattaaattcagcactacacagtatgcccttgaagtaaaatgaggttacctgctttatttggataccaagttcccttcagacagcattaaaataaagacaagtaagactacacagataaaatccagtataattcaaatccaacaatgaaaaatttcccccatattgttgcaaaattctttctactgaaatgctttgctacaataataaaaagcatacattacatataaaagataccagtgt

SEQ ID NO: 851 - DNA, 426 bp, Homo sapiens
gtggggagggggcacggatctccagggaatctgagacagccagaaagggagtgggctgagggttttggggtgggaggtaggggaagggtagatagagttcgtggtcaggtttagggagcagaaggaattggggatgttttccaggaggagtgggacctctcagaaaatttgttcttgggctggacatggtggctcacgcctgtaatcccagcactttgggatgccaaggcggacagatcacgaggtcaggagatcgatcgagaccatcctggccagcatagtgaaactctgtctctactaaaaatacaaaaattagctgggcatggtggcgcgcgcctgtaatcccagctactcaggaagctgaggcaggagaatcgcttgaaccagggagtcggaggttgcagtgagccgggatcgtgccacagt

SEQ ID NO: 852 - DNA, 578 bp, Homo sapiens
cttagagcagcatccagtatttgctttctagataatatgcccaataacatgacctagaggggcttctgtgctgtgtagggatttaaccaacttcagtggttcagggagctcaaactatatgtaaaacaagtttagaatgtatgctatctagcccgttatctctgatccttctctaaaaccatttgaaatagcttcattgatcaacatttcataaatgcatctgtggtagaggtagaaagcagcacctttcctaattggcaaatgatcagactaatgtgtgctaatgtttttcttccatgctttcagtcagattcaactattttatcctccacagttgcttaacttggtgttggaggagggtttaagcattaagataggaagcaggaaatttgattgctctaaatttagaaattatatccctaaaaattaaaacatgaatactgggtggtaatgataattgaggcaaatgtatttattttggtgacattttgcatatatgaagattttctgaaataggaccttcaagatcctagggggttttgtttggtttttaattgtgaggaataaaaaatcttctg

SEQ ID NO: 853 - DNA, 526 bp, Homo sapiens
  misc_feature 15, 488, 518, 519, 520, 521, 522, 523, 524, 525: n = A,T,C or G
acagttcaaatgcantggtgactttgatttatagcaagaacaagttttccatttgctctatatggaaacgtaaagagattttgaaactgctttaacaagggctgccacaagaacttcttttattgacttgaaaaattactcctacattcatgatgtcacaaaatcgtatgtatttttcagtcatggtttcatgcatttttattctataaacatacattataagtatacaaatatagattatattctataaataattcaaggatttataacatatctaaagatacattccttataaatatcagggatttttctgtataaattacttgtttgtttattattattattattattttgagatggagtctagctttgtcaccaggctggagtgcagtggcgtgatctcggctcactgcaacctccgcctcccgggttcaagtgattctcctgcctcagcctcccgagtggctgggattacaggcacacgctgncacgcccagctagattttgtatttttggtnnnnnnnnc

SEQ ID NO: 854 - DNA, 195 bp, Homo sapiens
accattggtggccaattgatttgatggtaagggagggatcgttgacctcgtctgttatgtaaaggatgcgtagggatgggagggcgatgaggactaggatgatggcgggcaggatagttcagacggtttctatttcctgagcgtctgagatgttagtattagttagttttgttgtgagtgttgggaaaagggcgt

SEQ ID NO: 855 - DNA, 257 bp, Homo sapiens
  misc_feature 203, 205, 245: n = A,T,C or G
actgcggcgggtaggcctaggactgtgggggcaatgaatgaagcgaacagattttcgttcattttggttctcagggtttgttataattttttatttttatgggctttggtgagggaggtaagtggtagcttgtgtttaatatttttagttgggtgatgagaaatagtgtaaggagtatgggggtaattatggtgggccatacngnagtatttagttggggcatttcactgtaaagaggtgttggntctcttaatctt

SEQ ID NO: 856 - DNA, 185 bp, Homo sapiens
acatggtgtggggcactagggggcagtagctttccttcacgttggcatccaggaagatccttctggggccggaaggcacagggcagtggggaaccagtgtttggagggtgtcctctgctatctacagaggaagaagagctgcagtgagaggtgggatccctaagttggacccacccattgcggcc

SEQ ID NO: 857 - DNA, 454 bp, Homo sapiens
  misc_feature 451: n = A,T,C or G
actgtggtcgggagactgatttgagactgcagagctgatgctgggtagagggtctggacttgtattcatgttctgtctcagggcagcccctggagcaggagatggcagaggcatttacagctgcagaaaacagggaggaatggaatctgaggtagccctggcctcaaaattcaggcctggctgtatcatttacagagatttttctggagggaaaagtctcatttctgaggaaggcaaggtggctaatcattattaattttttttaaactttttgggccgggcgcagtggctcacgcctgtaatcccagcacttttgggaagccaaagtgggtggatcacttaaggtcaggagttcaagaccagcctggccaacatggtgaaaccctgtctctactaaaaatcaaaaaagtagccgggtgtggtggtgcacacctgtaatcccagctactcngga

SEQ ID NO: 858 - DNA, 571 bp, Homo sapiens
  misc_feature 475, 488: n = A,T,C or G
acagtcatagctcacttcagcctcgaactacttagctcaagagatcctgccgcctcagcctcccgagtagctggaactacaggtactacattcttattttctaacttttaaacactgtattggaggtttttttttaatttacagatcatatttattttactatttttgtagaaaattattaattttgattgtatttttgtattttaaaagcttcttcacttgtgttccctaaatattcatattgctgcccaaaagtatgactgtggaggaaaaaaaaatactttaaaaatccacactttttgttaagaaggaaacatttagcatttatatatttgtgtatggaaaacacttgatattttatccctgttgcatctggctgcacagagcctctcctcaaagatgctacaaaacttgaatataacacattttggaaggctgactaacctcgattctgtgttgtgatgtgcaatactgnttctaatgtttgnataaaaaaaacagtgtaaaacctttttaatgcaaatttatttttttcattgcatattttgcagattttatccacagtgtcatt

SEQ ID NO: 859 - DNA, 520 bp, Homo sapiens
acacaggattggacccagttagacaaaatgaacatacttgtttaggaaaattgcattgcaaaacaggcagaggtgctgtgcagtgattcctatggaattgattggtcccctaggggatgtttagcttgaattgcacctcagtctgcgtgccatggccacactatgttcagctggtctggacaaaatggtcagatggtagaaatggtaagaagtatgacaagagttcctattatctggaaccatggcagtatagtggcacctcaacctcaaatgatatggcccattgtaggagctaaacaaggatttgtggaaattattaatagctcttaataaaatcaaaatttaggaaagaataaaaaagcatctagaaggccactctacaaacttgtctttggatattgcaaaattaaaagaacaaatatttaaagcatcacagccacacttgaccttaatgccaggaactagagtgctcgaaggagctgcagacagattagcagctagtaacctattcaaatggaga

SEQ ID NO: 860 - DNA, 173 bp, Homo sapiens
  misc_feature 120: n = A,T,C or G
acacagacaaatttatgcgaccagggcagaggctgtagatgattcatatttccaattgggagggaggactcgcttggtcttataatatcgagccaaacggtgaatccggctctctattanaatcagacggaatttagcatccttatcctttctgttcctctcaagatgctttc

SEQ ID NO: 861 - DNA, 323 bp, Homo sapiens; identical to SEQ ID NO: 593

SEQ ID NO: 862 - DNA, 320 bp, Homo sapiens
  misc_feature 236: n = A,T,C or G
acagcaaagcgacccttggtgtcatagatcagacggaaattctctcccgtcttgtcaatgctgatgacatccatgaatccagcagggtaggttatatcagttcggaccttgccatcgattttaatgaaccgctgcatgcaaatcttctttacttcatctcctgtcagggcatacttaagtctgttcctcaggaaaatgatgagggggagacactctctcaacttgtggggaccggnggatggacgaggagcaaacacaccggtcaatttatccaggcatccaatgctttggagctgccacccgcttcagatgctacctgc

SEQ ID NO: 863 - DNA, 277 bp, Homo sapiens
actgatgaagtatcgagtaaggaggagttaccaaccacaaatgtagctctgtttggggtatctgtttcagccactaagggttttataacctcaacttttctttctcggtttatccctgtctcttcctctactgaatcacatttctggttatttctgaccagcataggttcacgtctacaacaattgtctgggactttcttttgtgtcactacaggagatgtgatagggttttttaatgagagtgtagattctgtctctgtttgttcaaagaagatgt

SEQ ID NO: 864 - DNA, 407 bp, Homo sapiens
acttcctcaatgtatttgggcttcggagcatttactctctgattctgggccaagataatgccgctgaccaatcacgaatgatgcaggagcagatgacgggagcagccatggccatgcccgcagacacaaacaaagctttcaagacagagtgggaagctttggagctgacggatcaccagtgggcactagatgatgtcgaagaagagctcatggccaaagacctccacttcgaaggcatgttcaaaaaggaattacagacctctattttttgaagaccgagcagggattagctgtgtcaggaacttggagttgcacttaaccttgtaactttgtttggagctggcacctcttgaaataaaaaggaggatgcacgagctggcaggcatgcaaaaaaaaaaaaaaaaaaa

SEQ ID NO: 865 - DNA, 195 bp, Homo sapiens; identical to SEQ ID NO: 8

SEQ ID NO: 866 - DNA, 242 bp, Homo sapiens
acaaagttaaggaggtagggaggatggtggggaggagggggcggactaccctgcaggacgcgggaggctgctcagactgtggtgatgtcaggaagggccgcacactttggcatggacgatgcactaaaaaaagagaaagggaattctaaatccctcttaaccagctggagagggaaggacgcagggccagggtggggacaagtgttggcttcggaaggctctgagtggtggggccggaatgt

SEQ ID NO: 867 - DNA, 419 bp, Homo sapiens
acctacacacgtcgtgcattagcctgtatggttttgctgtctaggatctattttcaatataatacagagtcaaagcaatgaaatggaaaccaaagggttaaactagttttgtgggttttatttcctccgaagtctaaatgttcacatttctgattagaataatgtggtttataattaattttcatgaattattcataacacttaaggtaaaacaaaaaagctgatattggttattttggttattatagctctatagcttacactcaacatttaagggtgaaaaccgcatccattttgttaatgctgtgaactgcagaagaaaaatttttataatataaatttttaagaaaaagttaatacaaataaatgtaacaactaaaataaatgtataatgccatggctaatgatttgcatataag

SEQ ID NO: 868 - DNA, 404 bp, Homo sapiens
  misc_feature 13: n = A,T,C or G
acgattatagttnggatatgtggagtttgggttgtatgctggcaagtatgatctttcggaaggagccatttttccatggacatgacaattatgatcagttggtgaggatagccaaggttctggggacagaagatttatatgactatattgacaaatacaacattgaattagatccacgtttcaatgatatcttgggcagacactctcgaaagcgatgggaacgctttgtccacagtgaaaatcagcaccttgtcagccctgaggccttggatttcctggacaaactgctgcgatatgaccaccagtcacggcttactgcaagagaggcaatggagcacccctatttctacactgttgtgaaggaccaggctcgaatgggttcatctagcatgccagggggcagt

SEQ ID NO: 869 - DNA, 602 bp, Homo sapiens
  misc_feature 566, 583: n = A,T,C or G
acaatcatgcctctttgcccatccgttatctatgactcctgtcaccctacaatggcagagttgaatagctgtaatagagaccacatggcccaacatattcgctatctggcactttacaggaaaagtttgccaatctctgctttataccatgaccagaatgccctgatactcaaatctaatcttgtgattcccctgctcaaacttttccactgtgttcctgcagaaaacattgctggcttcctatgcatagtcattatttattctttattgctgtagaaacacaagttcatttagatatttactattccgttacccccatccaatcttaaaagaaaaatcattattctaagctaatcacagtaattacatttgctttcctagtgattggtatagaaataagcatgtggtataatccagccaataaaatgttacaggaagattactgcaagcttccaagttttcttcctatttaaaaaaaaaaatgtgaacaaaagcagcacccccagccttcagatattgtcttgagttagcatgatgattggagctgttgctaattagccaaccangaaaggagacatggacnaaacactgccgatagcaca

SEQ ID NO: 870 - DNA, 195 bp, Homo sapiens; identical to SEQ ID NO: 8

SEQ ID NO: 871 - DNA, 285 bp, Homo sapiens
  misc_feature 16: n = A,T,C or G
acctggctttcctccncaagcggatgaacaccaacccttcccgaggcccctaccacttccgagcccccagccgcatcttctggcggaccgtgcgaggtatgctgccccacaaaaccaagcgaggccaggccgctctggaccgtctcaaggtgtttgacggcatcccaccgccctacgacaagaaaaagcggatggtggttcctgctgccctcaaggtcgtgcgtctgaagcctacaagaaagtttgcctatctggggcgcctggctcacgaggttggctggaagt

SEQ ID NO: 872 - DNA, 241 bp, Homo sapiens
actgcctccctcttcaatgctgccaactggatggagtccagttcctgggatggtcgttatgccatggtggtctgtggagacattgccgtctatcccagtggtaatgctcgtcccacaggtggggccggagctgtggctatgctgattgggcccaaggcccctctggccctggagcgagggctgaggggaacccatatggagaatgtgtatgacttctacaaaccaaatttggcctcggagt

SEQ ID NO: 873 - DNA, 179 bp, Homo sapiens
  misc_feature 168, 170: n = A,T,C or G
acaatggaatatcattcagccttacaaaaggagatgctgctatatttgcaataacatgggtgaacctggaggacgttacgctaagtaaaataacaatattgaaggaaagaaataatactgaaagaaaaatattgcttgatctcacttatatatggaacttaaaaactncncatagaaac

SEQ ID NO: 874 - DNA, 511 bp, Homo sapiens
  misc_feature 146, 242, 303, 325, 420, 461: n = A,T,C or G
caagctttttttttttttttttttttttttttttatttcatctctttttattacttgacctaccattaagacaatctataacaaaaaaagtatattagcacacatggtataatcagactggtaatcaggaagcaatacaaaacggncctttggccatctatactttctagagcagtaaatctcataaattcacttaccaagcccaggaataatgacttttaaagccttgaatatcaactaanacaaattatgccaattctgatttctcacatatacttagattacacaaagataaagctttanatgtgatcattgtttaatgtanacttatctttaaagtttttaattaaaaactacagaagggagtaaacagcaagccaaatgatttaaccaaatgatttaagagtaaaactcactcanaaagcattatacgtaactaaatatacatgagcatgattatntacatacatgaaactgcaattttatggcattctaagtaactcatttaagt

SEQ ID NO: 875 - DNA, 332 bp, Homo sapiens
actcaatattataaaaacctcaaataattgacttgattttacacaacatccttcccttttctacaagttaatttttttacaaatcatttgggttatctcctaaataggttatattttattgcttctagaaacaatgtttcaaaatatatgtgcattatcagtaataatttgtataaatatttcccacaacaattttcataattttcaaagactaatttcttgactgaagatattttgctagggaagtgaaactttaaaattttgtagattttaaaaaatattgttgaatggtgtcatgcaaaggatttatatagtgtgctcccactaactgt

SEQ ID NO: 876 - DNA, 446 bp, Homo sapiens
  misc_feature 365, 393, 438: n = A,T,C or G
acggtaacatgctgtccaggtttgtagcctaggagcgataagctgtatcattgagtctatgtgtataataggctataccatctaggtttgtgtaagcctactctatgatatttatacaattatgaaatcacccagcaacccatttctcagaacttatcccagtcattaagcaatacatgactatattattatcactaacttattttgtggctttgataagccgaatatgggaaaataaacatttactgaagaaaaggcagtctatacatcaagttttggtaaaagaaataagtttttttttgagacgaggtctcgctctgtcacccaggctggagtgcagtggcgcgatcttggctcactgcagnctccacctcccaggttcaagcaattctnccacctcagcctcccgagtagctgggattacagctgtgcgccatnatgcctgg

SEQ ID NO: 877 - DNA, 563 bp, Homo sapiens
actctttggaggagcaaaggaacaatagaacctagagtttcttttttagggggagataagggtcttgctgtgttgcccaggctggtggctggtctcaaaaatgacacattgaatacaagggaacaattcaaatgaccatcactgatttctcaacagaaacaatggaggccagcagacagtgaagtctttaatagaagaaaaaaacctgtcaatctataattctgtatcctgcaaaactgtccttcaacaatgaaggtagaatagacatttcatacaacagaaagctagaattgatccccaatcaacctgcactccaaactaaagttagttcttcaggctgaaggaaaatgttatcagatggaaactcagatcttcagggaaaactgacactcaaactggtatacatgagggtaattataaaataccattttttattttagtttcctcaaaatgcacagaattgttaaaagcaaaacctatttaaagtaaaatcttatttggggctataagatgtagatgtaaaatatatgacaactactgcataaagcagaggtcagcacact

SEQ ID NO: 878 - DNA, 482 bp, Homo sapiens
  misc_feature 282, 317, 318, 463: n = A,T,C or G
actgattttaaaaactaataacttaaaactgccacacgcaaaaaagaaaaccaaagtggtgccacaaaacattctcctttccttctgaaggttttacgatgcattgttatcattaaccagtcttttactactaaacttaaatggccaattgaaacaaacagttctgagaccgttcttccaccactgattaagagtggggtggcaggtattagggataatattcatttagccttctgagctttctgggcagacttggtgaccttgccagctccagcagccttnttgtccactgctttgatgacacccaccgcaactgnntgtctcatatcacgaacagcaaagcgacccaaaggtggatagtctgagaagctctcaacacacatgggcttgccaggaaccatatcaacaatggcagcatcaccagacttcaagaatttagggccatcttccagctttttaccangaacggcgatcaatctttt

SEQ ID NO: 879 - DNA, 321 bp, Homo sapiens
acagagttttatataaatttaaaccaatttttaaaacaaaactgcggacaccaccataaaaatggaatcaaaagaaagttaatttatgaaattaagaggtcagcagaatatactcagtgatggaagacacttgggaaagtctttttaatagaacaagaacgatcttaatttaagaatattatcctggtttaacaacagtgccctgtttacaacagattgtgccctatctcatctgcagccgaggaataaaggattctgattagaaagagggttgcctacagattagtaagcaattccttggatcttatgcacagaacttgt

SEQ ID NO: 880 - DNA, 180 bp, Homo sapiens
  misc_feature 153, 154: n = A,T,C or G
gccacctgcaagatggacacgagccacaagctgcactgtgaacctgggcactccgcgccgatgccaccggcctgtgggtctctgaagggacccccccccaatcggactgccaaattctccggtttgccccgggatattatagaaaattatttnnatgaataatgaaaataaaacacacct

SEQ ID NO: 881 - DNA, 279 bp, Homo sapiens
accacgtggttgaaattggagccagctgtaaacatggccgccttcctcagacattctccgaagaccaccatcagcagccctgtgacactgagccaggtaatctgcttcagttctggccaaaagatattttcaagtatgaactctaaccaagaagaaagagcagctactgtatactccaggctgtgattcaggagaaaggaatccaaggacagactttgggattattgactgctgtcaccaagtattcagaatagtggaacaatgacagggagcacatgt

SEQ ID NO: 882 - DNA, 207 bp, Homo sapiens
  misc_feature 173: n = A,T,C or G
acatgtcaaatgccttctgtcccagcacagctcccgtggttccattcaccagggcgatgtttaggcctctgcccacattgtttttcacaggactcatgatcatgcggtcttcaaagcacatagtagggcccacgacgttggcggccccactgcagattttaaacgcaaagtanttggctgggcagggcttgatgaggccacacttgt

SEQ ID NO: 883 - DNA, 375 bp, Homo sapiens
  misc_feature 17: n = A,T,C or G
actgtaattatacaaantccaaagaataaaatgttactagttacactcgttaaaatgaaactgacaaccaaaagaataacaaaacaaaaagaaatctctgtcagaatccatagagacatttgacaatattacaaaaaaaagtagtcaaataattgtcccagcatgctgcagttcattgccataacttcataaattcccagctctttgggggaaagaaagtgcgtttttcacagcctatatagttcttaaagaaatagctctcacatgtatgcaggtcaacagaacaaggaatgcaaagtctaggcaccacgattgctcagacagcaacagagtttcaaagagtccaacttgacactcttctgaaccagatgtggt

SEQ ID NO: 884 - DNA, 477 bp, Homo sapiens
  misc_feature 16, 17, 181, 431, 443, 454: n = A,T,C or G
acttagaaccagaatnncatactgtataatttagtggacttagttatttcaaaagatattattccacttccctgctaaatgaaattaatcatcacctttgactttcaagaggtgaaaatagcgtgtaataaagcatatcttttagtcatcaggcctactgtgaaaagcaaatacagactgnatatattatatactagctgttattttttgcttcaattgtattttatctcttttgttaaaaaaacatgatttcatcttgtaactgaactgcacatataatatcagagaaaatcttctaatggcatgacttgtaaaatctctaccccaacaaattagtttgatatctaggagttaccttatctgaaacataatgagttatgttctacagtgtctgccatcaaactttaaacaaatcaggtccctctttcagntaagtatgttgntatactgaatncatgagtgttatggaaaagattt

SEQ ID NO: 885 - DNA, 310 bp, Homo sapiens
  misc_feature 8, 187, 188, 237, 264, 299: n = A,T,C or G
actactcnattgtcaacgtcaaggagtcgcaggtcgcctggttctaggaataatgggggaagtatgtaggagttgaagattagtccgccgtagtcggtgtactcgtaggttcagtaccattggtggccaattgatttgatggtaagggagggatcgttgacctcgtctgttatgtaaaggatgcgtnnggatgggagggcgatgaggactaggatgatggcgggcaggatagttcanacggtttctatttcctgagcgtctganatgttagtattagttagttttgttgtgagtgttangaaaagggcgt

SEQ ID NO: 886 - DNA, 548 bp, Homo sapiens
acatataaatgaatctggtgttggggaaaccttcatctgaaacccacagatgtctctggggcagatccccactgtcctaccagttgccctagcccagactctgagctgctcaccggagtcattgggaaggaaaagtggagaaatggcaagtctagagtctcagaaactcccctgggggtttcacctgggccctggaggaattcagctcagcttcttcctaggtccaagccccccacaccttttccccaaccacagagaacaagagtttgttctgttctgggggacagagaaggcgcttcccaacttcatactggcaggagggtgaggaggttcactgagctccccagatctcccactgcggggagacagaagcctggactctgccccacgctgtggccctggagggtcccggtttgtcagttcttggtgctctgtgttcccagaggcaggcggaggttgaagaaaggaacctgggatgaggggtgctgggtataagcagagagggatgggttcctgctccaagggaccctttgcctttcttctgccct

SEQ ID NO: 887 - DNA, 222 bp, Homo sapiens
  misc_feature 24, 89, 145, 152, 153, 188: n = A,T,C or G
actgattattaaaatgacatgtanttatcagagaattcactgacgtgtggcttaatacatgtaaatctagacctctgacatcatggtgntttcttaatgcctcacattgctggcacggggatgtgccctgcctgccagcacctangacttcnngttgggttgcagcttatgacatgcatgataggttntggaaggtaacttttaactgcaaacctataaagt

SEQ ID NO: 888 - DNA, 439 bp, Homo sapiens
  misc_feature 233, 397, 432: n = A,T,C or G
acagcattctggaataaagcaagagtgttcattcacacacacagtagcttcaaaactgttcgatctgtttgttcccatgtagttttctaaagatggaaaaaaaggactttggtcatcaagactactgtggccatattagattactggaacatctaagcatcagtgtgtgaccatgcgaacaaaagacttcgtggagtgtctatttttaaaaaggtttatgtgtgtcgaggcanttgtaaaagatttactgcagaatcaagcccacttttaggcttaggaccaggttctaactatctaaaaatattgactgataacaaaaagtgttctaaatgtggctattctgatccatagttgttttttaaagaaaaaaaatgtatatacagaaagagtataaaantttgtgaatttaatgcaaattagcttccagtcttnacttccc

SEQ ID NO: 889 - DNA, 577 bp, Homo sapiens
actactaaattaataaatttattccacttttgaaatgacagccaaaaatccacctaattgattctcatttggcacgttcttctcaattctgttcactaaattaaaattactaaatttaaactgccaagagccatgatgttgtctgcacaagacaacattttccatcactttcagaaagttatatttggcacgttaaggaaaaaaatataatcccacagcagcagctatttaaaataagacagccacaggattcatgcagaatattttaaatattcctgttgaacacaatgatttaattgattttttcttcacggattatgctcccaaacatcctatatgcatccatggaaatttaaagatcctggaatagcgtcttccatgtgggacatcttaaaagatagtattttggcttcagtgagttacacaaatgaatcaccagtccttattaattcaatgggtctgtttacagagtgtggtaatttcgttctttagatttgcagaatttataaagaaagaaaattacagcctgcacacccaagaccaggacaattcctccaatgaaactggctgcatcaaa

SEQ ID NO: 890 - DNA, 364 bp, Homo sapiens
acacaaagagggggtgggtgtcggatgcagagtgtgtggcctgatgctccacggcgtgcaggacggggggctaatagtaggtttccttctccacccagccgccagggcgtcgcctgatgatgagttttctgacttcgtcatatacgaagatgagaagagagtaggggaaggcacagaaccaccaggtaggtttgaggggatacatcctaagagcaacacccattccagggcagtaggaaaggaaagcagccagggctgtctcttcaaagaggccaaatatcaagatcttgttcttcatcccctgctggaagaccgaattcctcctggtcttacagatgaccaagtcggcccactgcaccaccac

SEQ ID NO: 891 - DNA, 456 bp, Homo sapiens
ttggaatccctgttgctacattgactaaaaggtcatgatgaatggaatatgtaagacttggctcatagaaacctaatcagatggttagaggtgttggcagtttaggacctgctgtcataaatgtgtgaacaaccttttgtaacctaacctattgacctgcatgttttttctttaccccaattcattacatggaggctcaatcttgagtttgctttactggttcagcaaaagccaggaagaacaactttgtagtaatcaaaatgttatccaactgtatattgtttactttattgtaaatactggtgaacagtggttaataaatagttttatattcctttatgcaattattagacttttttctttatttgatatgcctttacagtagaaatagaaatgcccacactcattggattatctttgtttataagttagatgataccagtaaggcattacagt

SEQ ID NO: 892 - DNA, 242 bp, Homo sapiens
actgtaacctgatgccagatgctatgggcgtgatgagaactagagcattgcagcatggaggaaactgtgaggcaccagatcctgtgcttctgcaggccattttctgaaaacccctgttaggaaggttggatttggcgtgacttgcttgagcaagagtcctggggagagattttgaggtttaatttaacggtatatccagagctaacagtgactcaactcgtctagttctgcaagtcagatgt

SEQ ID NO: 893 - DNA, 473 bp, Homo sapiens
acaaagcagcaactgcaatactcaaggttaaaacattagaaaagcatttgtgtgacaggtatattacagtattatcaaaatattacattttcagacttacttagcagataatcatccaccagagcttaaatctttaaattatttccatagtcttaaaaaatatgtaatgtcagaatgcatataaaaagaatgtaaaaggaaacctaaaatacaaatggaataatgtaacaaataaatatttgatttcagtaactgttaataatcagctcaacaccaccattctctctaaactcaatttaattcttataggaataatgaactgtcaaatgccatggcataattatttatttccaagctatcatcaatgattagaactaaaaaaaatttggcataaaaaaatcacaattcagcataaataaagctatttttagcttcaacactagctagcatctctaagaattgttgaaataagt

SEQ ID NO: 894 - DNA, 500 bp, Homo sapiens
  misc_feature 436: n = A,T,C or G
acctctttagtcttcatcagatttgtttttctctaaaagtgccaccttgtggaatataccggaataaaacaagaaagctcatctcttaggacagtgtgaatgtttagaaagacttttgcaagaaaagtcaccttcctttcctaccacatcaacttcaaattgctgtaacagtatttcagcagatgctcgaaaagagcctgtatttattttcaggtggctcttgttttcttcctaaggctagacaaggtaacaatatgttgaaggaagtccacttctactcatttagctaaacgttatcacttcctggaaatgctgagaaatagaaaacattttgaaaagctgattggcacttcattaagaaaataaaaatccccagaaaggctacttgagaaaaaaacgtgtaaaaattggaccccttctgtttttacatttctgntgcttacaaaggtcagaagatagagagaccaaaggattatttttggtttattttctgaaaaagt

SEQ ID NO: 895 - DNA, 457 bp, Homo sapiens
acaagatttttaaggagagttaacaaaggtttaaatagatgacaaaaagggacttggtgacagatagtatttgccaatcaaattattcaacaggttttgaagggcgtgtgctaaacttctaaggtgaatcctgacgtggattactggattaccttttttgttgttttatttcacccaagtgcgtctatgtcatttacctaagtttttatgtgtggagtattctttgtaggagaggaaagataacagctgtagtctgattaacagtttttagtatctcacaatgaaaaataaataatgtgacttaaacattttgcatacttaaatttacatagagttttagcaagaaaataaggcatgactgataatggctcaggaaagttctaaatggtgtaacagactagatcttattaaagttccaaagaatttattatcaaaactaaaacaaaacttcagttgt

SEQ ID NO: 896 - DNA, 595 bp, Homo sapiens
actctgccttttaggagatgaggtaagacatatacatagatggcttttactagccaaggcaatgtaaatggactaagattctcatgtgacttgaggttatctgatgaatttattctcttcaaaaccacctacttttagagggcatgtttaacccctctctttatttaaggagggagagaaaaacacatgtaaccagaattcagagtgggttactcaacctaagagaacatacggagttctctttgggaaaacgacaagactacagtgttcacttcgcaccatgaagtggcactcctgttatggctgtcagagtcctctcacttcttatgaaaggatgcatctgattctgaaattactgatatattcgatcagttagggatgttttaaaaagtgaaaacaaatgccacacatacactttctagctttctgaaatcaccgaacacattacaaaaaatagagaatttaccctattaacttttagagaattttccaataatattcttggttaaagaagccaagtttgtgcatattcccaattttcagtgttcttgtttttatgcacaagagccaaagtagtatacacatattttacctc

SEQ ID NO: 897 - DNA, 559 bp, Homo sapiens
  misc_feature 446, 550: n = A,T,C or G
ggcgggtggatcatgagatcaggagatcgagactatcctggctaacacggtgaaatcccatctctaataaaaatacaaaaaattagccaggcgtggtggcatgcacctgaggtgccagctactcgggtggatcatgagatcaggagatcgagactatcctggctaacacggtgaaatcccatctctaataaaaatacaaaaaaaaaaaaaaaaaaagaatgaagatgaccagtttacataatttatctaataacttccactttttgaaatatatctaagaataaggaattaaaccaaatacacaggtgccaacattggtttacagttatactaaagctcacatacataggtcataatagttctacaagtcctgactgtaggcccttagtctattttggattaagttctatagcagaattgtttggtttaccaaaaataaagtcagncatggacagttgcaacaaataataaactggtctgatagcaaaggaagagatgttaaaaactacctaagagaccatgtggggccccatttgcctctgtgatgtgntatgctata

SEQ ID NO: 898 - DNA, 434 bp, Homo sapiens
cccggcctgaggtgtcggccggatccctccttctcccggcgcctcaagcggaagaccattcctcaagaattttgtatccaaggcccaaaagtttgttacccaagatgatgaatgctgacatggatgcagttgatgctgaaaatcaagtggaactggaggaaaaaacaagacttattaatcaagtgttggaactccaacacacacttgaagatctctctgcaagagtagatgcagttaaggaagaaaatctgaagctaaaatcagaaaaccaagttcttggacaatatatagaaaatctcatgtcagcttctagtgtttttcaaacaactgacacaaaaagcaaaagaaagtaagggattgacacccttctgttttatggaattgctgctgatcattttttctttaaaacttggatagattccaaaagttacagt

SEQ ID NO: 899 - DNA, 276 bp, Homo sapiens
acccagttcatggtaatttgttacagcaatcctaggaagctaatactctgacagaaaaaaatcttggataatatgcatgagaaaaatccttcaataaacacaaaattggtttcaaaatgttttcatgtaaaaataaattaacttttctgtaattagattgtgttttatagtaattcttgcctgcttcttagtctttgttgtaggatgcataataaaatacatgaatgagttttaaatggttagctttggagaatggttttgggaagttcctacagt

SEQ ID NO: 900 - DNA, 302 bp, Homo sapiens
acacaattatcaaagctgatattgaacacaaacaaattgatacaattcagtaatccgataatattcatagtcaaataagttactttaaattgcatgcaatacaactttatgttccatagcatctttaataaaaaccgtttaccaaaatggctcttcaaacttaaaaagtgcaattacagagtgcaaaataaaaagaaaatacattatattacatttaacatcatcaaatttgaataacagatatttaaatgaaattactctttttaaaaacattaaaatatacaccagaaatactgtttgta

SEQ ID NO: 901 - DNA, 404 bp, Homo sapiens
gttgaacggctgtgggcgtcttgctgccttgggtagggggttaaaatcgttcttgagaggaacgtctctgtgcgaagagataatgagtttagctctgagaagtgagcttgtagtggacaaaacaaagaggaaaaaaagaagagaactgtctgaggaacagaaacaagaaattaaagatgcttttgaactatttgatacagacaaagatgaagcaatagattatcatgaattaaaggtggcaatgagagccttggggtttgatgtaaaaaaagctgatgtacacaacaaatttatgtctcagctacatgatctaaaagttaaaggtcccaggagccccatcctgaacttggaaagtgtagccttcagaggtagtttctggcacaacgttttgatcttcctcttcc

SEQ ID NO: 902 - DNA, 474 bp, Homo sapiens
  misc_feature 155, 156, 188, 408, 409, 461: n = A,T,C or G
acttatttcaacaattcttagagatgctagctagtgttgaagctaaaaatagctttatttatgctgaattgtgatttttttatgccaaattttttttagttctaatcattgatgatagcttggaaataaataattatgccatggcatttgacagnncattattcctataagaattaaattgagtttanagagaatggtggtgttgagctgattattaacagttactgaaatcaaatatttatttgttacattattccatttgtattttaggtttccttttacattctttttatatgcattctgacattacatattttttaagactatggaaataatttaaagatttaagctctggtggatgattatctgctaagtaagtctgaaaatgtaatattttgataatactgnnatatacctgtcacacaaatgcttttctaatgttttaaccttgagtattgcanttgctgctttgtg

SEQ ID NO: 903 - DNA, 168 bp, Homo sapiens
  misc_feature 19: n = A,T,C or G
acatgaattattccagttntaaagtattatgcatgtttgtttaataaatgtggcatggttttaatacaaatgctatgttatttaaaagttagaggaacatttctattgacaaaaatatgcttcatttacatataatgttaccatatggtgataatgattaaattagat

SEQ ID NO: 904 - DNA, 272 bp, Homo sapiens
  misc_feature 13, 14, 52, 121, 218, 240: n = A,T,C or G
gaatttctcttcnntgccattgaaacgatgccttgtgtcaagaagaaggcanactgggccttgcgctggattggggacaaagaggctacctatggtgaacgtgttgtagcctttgctgcantggaaggcattttcttttccggttcttttgcgtcgatattctggctcaagaaacgaggactgatgcctggcctcacattttctaatgaacttattancagagatgagggtttacactgngattttgcttgcctgatgtttaaacacctggt

SEQ ID NO: 905 - DNA, 297 bp, Homo sapiens
  misc_feature 16, 17, 254: n = A,T,C or G
acagatctccagaagnnttgctggggtcagctcgttactcaactccagttgacatttggagtataggcaccatatttgctgaactagcaactaagaaaccacttttccatggggattcagaaattgatcaactcttcaggattttcagagctttgggcactcccaataatgaagtgtggccagaagtggaatctttacaggactataagaatacatttcccaaatggaaaccaggaagcctagcatcccatgtncaaaaacttggatgaaaatggcttggatttgctctcgaaaatg

SEQ ID NO: 906 - DNA, 465 bp, Homo sapiens
acacttctgtcttcaaactgtatcttctttggatggaattaagatgtaactgtatagttttaagataaataaatgggaagttggtccaactaagatgacagcagatatattacatgcaggatttaatattttctaattctctcttttaaaaaaaaggatgctgttggattgggaaaaaaaaagtcaaaaaagaacccagattcaatatataaaaatgtcccacaataggtcgacaatggcagtaaaaataagaggaaaaaagtaatctttctggaacatcatttttcaataacatagaaacactaagtgccaggaagattcctattcatgtaattttagcatccaagtttccctctatttattttattggaacaaatgctttaaataaactatttgtcctcttcactgaagagagctggtctatttcatctttaatgagctagtttttgggaagattagccatgt

SEQ ID NO: 907 - DNA, 503 bp, Homo sapiens
  misc_feature 432, 435, 437: n = A,T,C or G
acctgtgggtttattacctatgggtttatatcctcaaatacgacattctagtcaaagtcttggtaatataaccaatgttttcaaatgtattctgtcatacaaagagcagatttttattgaacttgtgcaataactatattaccatacaatataaatattcatgaatagtttcccaagtctggagcgaccacatagggagaaaatgtaaatgtctcaatttttgttcacaaaagtatattttatcaaattgctgtaagctgtggatagcttaaaagaaaaaaagtttcctgaaatctgggaaacaagacatttaaagaatcagcaaaatttcaaataaaaaattatgaaaatattatcctcattagttcatttagtcccatgaaattaattattttctctgcttgatcttggtggacagtttcatgaagctgncantntagttcattaaagttttggaaattctcagacagtgcaggtggtatcagaaacttgtattcaagagt

SEQ ID NO: 908 - DNA, 467 bp, Homo sapiens
  misc_feature 335: n = A,T,C or G
acataataagattttttaaaatctattgccattcatttatttttgcacaaaaacgtataaatatgtcaccagcttttcttaacttaaaaaacttaaataaaagacaccagatgaaaactaccctttgctgccatttttttttaagtttttttgtaggggttttttattttttgtgtttttttttctttttctgcttagaattgggtttctagggaagaaaagcccctgcattaaaaacagcccatttaaaaaaaaaattcaaagttctgatgaattccgggaaaaaagcaaccccaaagtggtaaaagattacaaatatctactttacaatttgncttctcaccaagataattttatacaagtttacaatcttcatcttcttatgctcttcaaaaggccttgagaattttcctttctgattaagaaaaaatagcactgcaatatttttaaagtcaattttacactgt

SEQ ID NO: 909 - DNA, 442 bp, Homo sapiens
acatcatcaaggctccctttgcactcccaagaagaactggtaattttaaacaaaagtatgtgtctttatttgtattggaaaatactgtctttaaattgtttcttgttgacactccccacaatggaaaaattaccgaattaaacctgttttatggatggcagcttggagcatagcaagaagttggaggatttgaattccattcccagttctcattgtgttttgtttcttaaaactataataatcggttactgttataaagtttaaaaggtggttttaatgtgaatagcaaattctggtatatcgtgactaacgcttaagaatgcctgtctttgagaggaaggtgttataatattaatgaacagtgccaaatacactgtgcatatctgcaatttaatctttgaatgtatgttactggattagctccctcctcctgtgtgatggt

SEQ ID NO: 910 - DNA, 119 bp, Homo sapiens
  misc_feature 1, 53, 96, 103: n = A,T,C or G
ncgggaggatcctattggtgcgggggctttgtatgattatgggcgttgattantagtagttactggttgaacattgtttgttggtgtgtatattgnaattganattgctcgggggaata

SEQ ID NO: 911 - DNA, 59 bp, Homo sapiens
  misc_feature 1, 2: n = A,T,C or G
nnactgagccaatcccacttaggaatggaaggcttggacatggaagggaggatataaac

SEQ ID NO: 912 - DNA, 292 bp, Homo sapiens
acatgcttcggtcagggtcggggcaggtggaagtgtgatcccgtcgaccaatgccaggattcagagactgggacgttttatcaaattggagattcatgggagaagtatgtgcatggtgtcagataccagtgctactgctatggccgtggcattggggagtggcattgccaacctttacagacctatccaagctcaagtggtcctgtcgaagtatttatcactgagactccgagtcagcccaactcccaccccatccagtggaatgcaccacagccatctcacatttccaagt

SEQ ID NO: 913 - DNA, 301 bp, Homo sapiens
  misc_feature 14, 15: n = A,T,C or G
acacaattatcaannctgatattgaacacaaacaaattgatacaattcagtaatccgataatattcatagtcaaataagttactttaaattgcatgcaatacaactttatgttccatagcatctttaataaaaaccgtttaccaaaatggctcttcaaacttaaaaagtgcaattacagagtgcaaaataaaaagaaaatacattatattacatttaacatcatcaaatttgaataacagatatttaaatgaaattactctttttaaaaacattaaaatatacaccagaaatactgtttgt

SEQ ID NO: 914 - DNA, 552 bp, Homo sapiens
  misc_feature 13, 14, 428: n = A,T,C or G
acaaagaatccgnnaagagactattaaatgtgacatgaattatggagtagaaaaatctgcttgatttattaattttatgatatatgtgatcagtatctaatttgatataaaattgaaaatattaaaaaatcattttttttcctcagagttaaaattatttccctcatactaatgcttaatggcaatgattactccagagttttttaatttttacactggggcaatagactaggaggtctctgatttcttcttggtctaaagtgttttgattttatttctacataatagctttggtattcatgtatatacatgcatttaattgtgattttatcacctttcccatttctttccccacaagctggcatttcagtagttgcttttgaataatggttttggttacctgggaaggcaggcccagaacccatttncttgacttgcagttccgggctgtgttcacatgactgctgtctagctgatgcatttttcacatttgtcaactctggttagaaacaggtcctcaggagtatttctctaacctgatattttctaaaa

SEQ ID NO: 915 - DNA, 509 bp, Homo sapiens
  misc_feature 14, 15: n = A,T,C or G
ctcagacatatganncaagctctatataaatccaagacaagcaacaaacccttgatgattattcatcacttggatgagtgcccacacagtcaagctttaaagaaagtgtttgctgaaaataaagaaatccagaaattggcagagcagtttgtcctcctcaatctggtttatgaaacaactgacaaacacctttctcctgatggccagtatgtccccaggattatgtttgttgacccatctctgacagttagagccgatatcactggaagatattcaaatcgtctctatgcttacgaacctgcagatacagctctgttgcttgacaacatgaagaaagctctcaagttgctgaagactgaattgtaaagaaaaaaaatctccaagcccttctgtctgtcaggccttgagacttgaaaccagaagaagtgtgagaagactggctagtgtggaagcatagtgaacacactgattaggttatggtttaatgttacaacaactattttttaaga

SEQ ID NO: 916 - DNA, 372 bp, Homo sapiens
  misc_feature 16, 18, 28, 29, 131, 208, 265, 326: n = A,T,C or G
acaaactaaggatgcngnctatgaggcnntcatgaaagagatggaagggctactgtgacagcttttgatgccagaaaaggcttctgttcacaacagtggcccatggagaaagaggctcttattaaacttanatgaaagagctgcttccattgtcagggtattttctaatttcagttcaaggaatatcctaaaatttagccttgttcanaatttactgcacataaaaaagggtatttcatccagaatagatcagttattgaagcantgctgctaacatccattcccttttcataccaccattttcaccctgtttcttcccctcctcncagttctttggaaatttgtgatcgggggatcttagttgcttatttg

SEQ ID NO: 917 - DNA, 479 bp, Homo sapiens
  misc_feature 18, 454, 462: n = A,T,C or G
acttatttcaacaatccntagagatgctagctagtgttgaagctaaaaatagctttatttatgctgaattgtgatttttttatgccaaaatttttttagttctaatcattgatgatagcttggaaataaataattatgccatggcatttgacagttcattattcctataagaattaaattgagtttagagagaatggtggtgttgagctgattattaacagttactgaaatcaaatatttatttgttacattattccatttgtattttaggtttccttttacattctttttatatgcattctgacattacatattttttaagactatggaaataatttaaagatttaagctctggtggatgattatctgctaagtaagttctgaaaatgtaatattttgataatactgtaatatacctgtcacacaaatgcttttctaatgttttaaccttgantattgcanttgctgctttgtacctg

SEQ ID NO: 918 - DNA, 371 bp, Homo sapiens
  misc_feature 15: n = A,T,C or G
caggaccagctgggnctcaaaactttaaaaacagcaaactggaccaaaaaaatagaacaacagagaagaaaataattagcaagggaatgtcttaacatatagactagatctcttctacagcacataaacttttctagacttacaaaaaaaaaaaaaactctgatatgcccattattatctattatctctaaaaacaatccaacttctcacttggcaatcaataactatatttaatttccttcatgcaaattctcccccatcatgaaataaaacatttaaaatattcatgacaccgagcacagacttcataggttacttagatttaaaatgattatgcacacattatcataatccaattcataatgaatgtt

SEQ ID NO: 919 - DNA, 557 bp, Homo sapiens
accagaaacaaaacatgatgagaatacattgaaacactggatttacttaagaaaaacctaagtttttcaaatctaatttatttaagaaaacgtattttcttaataaatgtaacacagttcttacaaggtatggtaataagcagaaagtagaattttgaatattaatgtcaaagtatgttttctgccattttgatggagttgatactttttcttgtaagttcttcctgtagtgaaagagagaaagtgaggtgtcattgccgaaaggacacactaataacctcttggtagtttattgcaggtaaaatcattttttaattaagctgacaacgtggtaaaactgcagcattaaattgtaattatgtttaaatggaagtctttctgtagagtgttaaaggatgataaacgtttgaggttcaaataactcgactgtcttatcaaacaccatgtctataagtaataagtttctgggagaattgtgaattggattttgttttatttcaagtggatgcttttgtgcccatattttaagctgccgttgcttacaagacctgcacctc

SEQ ID NO: 920 - DNA, 503 bp, Homo sapiens
acctgtgggtttattacctatgggtttatatcctcaaatacgacattctagtcaaagtcttggtaatataaccaatgttttcaaatgtattctgtcatacaaagagcagatttttattgaacttgtgcaataactatattaccatacaatataaatattcatgaatagtttcccaagtctggagcgaccacatagggagaaaatgtaaatgtctcaatttttgttcacaaaagtatattttatcaaattgctgtaagctgtggatagcttaaaagaaaaaaaagtttcctgaaatctgggaaacaagacatttaaagaatcagcaaaatttcaaataaaaaattatgaaaatattatcctcattagttcatttagtcccatgaaattaattattttctctgcttgatcttggtggacagtttcatgaagctgtcagttagttcattaaagtttttggaaattctcagacagtgcagtggtatcagaaacttgtattcaagagt

SEQ ID NO: 921 - DNA, 282 bp, Homo sapiens
ttttttttttggctctagagggggtgctatagggtaaatacgggccctatttcaaagatttttaggggaattaattctaggacgatgggcatgaaactgtggtttgctccacagatttcagagcattgaccgtagtatacccccggtcgtgtagcggtgaaagtggtttggtttagacgtccgggaattgcatctgtttttaagcctaatgtggggacagctcatgagtgcaagacgtcttgtgatgtaattattatacgaatgggggcttcaatcgggagt

SEQ ID NO: 922 - DNA, 221 bp, Homo sapiens
acaacaggatgagactctgaaatcactttcagtattccctgctagatattgattgttatttcaagtattaagtgtaagcttttaatggataattagtataactgtggatggcatctgattttgtttttaattctgtggattgtgtttaagcaattcaatagtatgttcctgattttgagatgctaagtggtattgcacagttgtcactttatcaagtgtgt

SEQ ID NO: 923 - DNA, 202 bp, Homo sapiens
accattggtggccaattgatttgatggtaagggagggatcgttgacctcgtctgttatgtaaaggatgcgtagggatgggagggcgatgaggactaggatgatggcgggcaggatagttcagacggtttctatttcctgagcgtctgagatgttagtattagttagttttgttgtgagtgttaggaaaagggcatacaggac

SEQ ID NO: 924 - DNA, 615 bp, Homo sapiens
acacaagtgatcaatttgtcacaatatgacaagttattgataacaagtattttaacttacaggtatgataaaagtctaacatttacaaaatggggatattactatataaaaaattgaaagtattagtttttatgtaaaatattagtttcttcattctgatacagtgctaaacttaatgtaaagccaaacttcaggacctactctagacataaaataattttcatttccatgtctctagaatctaaaatgctaagtaaattttctctattacttttcgtcaaaataacttaaagtattaaaagacaacctaatgacagtaataacatttttctttcctaaaaaatatttggtatctgatttaaagacatgaataacacaatagtaacaacttaaagatcgacaagatatactaaaaatgatatttgggcatcatatctacataataattgtgaaacaactgttttcctaataactgagaagcaatcagtaactttttcataaaaggactttcatagcttctaaaatatggaattcagcactgtaaagcagaaacactaaacatgtcaaaacacctagcgtggtataggtaaccacaaatctgcaaatgacacactg

SEQ ID NO: 925 - DNA, 467 bp, Homo sapiens
  misc_feature 16, 17, 18, 150, 171, 173, 181, 183, 184, 231, 268, 269, 393: n = A,T,C or G
acaagcagacagtgannnatcatcctgccactaaaaatggtttctgaaaaataatgatgtgggaaaatacaaataattaaatgaaataaaaagaattactaagtttgatctcaagaaacactagaaaatatccttcatatggctctgagngttggaattgtggtgatgttncngtatacantnntaaatttttcgagttttctacaatatgcctatattatatagaatttnctaagatgaattaaaaataaaaaaggctaaagcatannataaccttccccaaacacacaaggattttaaataaattgaaatttcctcatactagtaattttgtgctttttttttacagatcaactggtgagactgcagtcagtgcttttgagattgacaagntgtaacccctgtctttagatttacagtccaatgcttcactcagccattttacctcaccccccaaaaaaaaaaaa

SEQ ID NO: 926 - DNA, 434 bp, Homo sapiens
  misc_feature 14: n = A,T,C or G
actacaggcgcccnccaccatgcccggctaatttttgtatttttagtagaggcggggtttcaccatattggccaggcttgtcttgaactcctgaccttgtgatctgcccacctcagcctcccaaagtgctgagattacaggcgtgagccagtccgcccagcaaggcgggtcttgctgtgtttcccagactagactggtcttgaattccagggctcaagagatctcccacctcagcctcccacagtgctgggattacaggcgtgagccgccacacccagcctattcaaaattttttttcttagagacagggtctttgttgcccaggctggactgcagtgatacaatcatagctgactgaagcctcaaattcccaggctaaggtgatcttctcacctcagccttccaagtagctgggtccgcagatgcatgccagt

SEQ ID NO: 927 - DNA, 544 bp, Homo sapiens
aaataagttatggcttaaaatgcttttggagtttatttctcaaaattaaaatctggtcacatgagctttagtttgttttctggtttaaaaaataaaaaggtttctcttaacagtatttccagtgacaatgcaaggtaagtatatcaaaggaaatcaacagttgtgcttgggggctttttgttatgggatattgatttcttgttttttttccgtaacattgtctgctgcaatttaaataaaaattacgacattttaagatatttcatagacaaaccaaacaaaaatatatgtttttactttaaagtgaatgtttttctcttcagctgatctaaaaatgaaagcaagatatcttatgtagaaatattttgataatatttttacagtgagctttcccatgtttttatgtcttaagtttctttgctgcgtttatgtaggttgcacaagaacttttactcacttgtaattgtgcctcagactttttgaaagtctaccttctaaattgccccgacgatctagattctacatgttaccattggtttattct

SEQ ID NO: 928 - DNA, 379 bp, Homo sapiens
acagcattctggaataaagcaagagtgttcattcacacacacagtagcttcaaaactgttcgatctgtttgttcccatgtagttttctaaagatggaaaaaaaggactttggtcatcaagactactgtggccatattagattactggaacatctaagcatcagtgtgtgaccatgcgaacaaaagacttcggggagtgtctatttttaaaaaggtttatgtgtgtcgaggcagttgtaaaagatttactgcagaatcaagcccacttttaggcttaggaccaggttctaactatctaaaaatattgactgataacaaaaagtgttctaaatgtggctattctgatccatagttgttttttaaagaaaaaaaatgacctg

SEQ ID NO: 929 - DNA, 523 bp, Homo sapiens
  misc_feature 15, 16: n = A,T,C or G
acaaataatagaatnnccaaaatatgtcagatacagtggaaaatgttcatatgaagtggaagatgaactgtattaagcaattgtaatacaattttagctcttgttatatacatgcctagaaaaatggcaagaagtaacctgttactctgatgggactaattcagtattttttttggcattttctagattttcttaccactaatagcaacttttataacttatgattattattatttttttttaacctttcctaatgaatctttttttttcagtaaaagaaacagtaggtcaacagaggtatattccctaagtggtgcttttattttgaaaatattgtcaatgcaatacttttttcaaaatcgaaaataaaatattttgcctacttattaaaaagaaatagtttttaccttgttctgaggctgggtaatgagaaccaaattgcaaatttgcagaatttttttcctaacattgtcaaacaattggtaatagttgtttttgagattgaacagaatttgatgtgttt

SEQ ID NO: 930 - DNA, 307 bp, Homo sapiens
acttaaatgaaaattgatcataggagaaaaatagaagttataaaatgaaaaatgtgacatgtatagatgaaaaataaacatttgaaataaaaattccatgagatagaataagttatggattttaccctaacatcagaaaatttatagaaaaaaatagaagctttccaaactaaaggacaaagggtaaactaaaataagaaagccagaaactcactgatacgtgagacaatatgcagcagtgtaacatacatgtaattaatatctcaaaaaggatgggtgggggaattatagttgaataaagagtggt

SEQ ID NO: 931 - DNA, 494 bp, Homo sapiens
  misc_feature 18: n = A,T,C or G
acacttttgttacagttncatatatgaatagttagcagaggagaaactcctccgttgttcctacaccaagggaaaaaatgtaaggactgtatagctcatgaataatattaacatttttctatcacaaaatattgataaaattggaattgtatcaattcatgttatggagcttaacattttagccgaaatattaagataatataaataaggcttttagcttcatatcaagacctatttgaacacttctagaaaagaacattaaaagttttttcctcatttatggtttgatttagtgtagtgcctcaactgttcttaatggtgtcttagtataatgcataattattagaatataattataaggcattacagaattttatgtggatacttgcaaagatatttcagtccaaaacttcaaattacacacccaaatatgtttgttgccttaatctatacttggacaaaggcaacattttaatttttgctaagtcttaact

SEQ ID NO: 932 - DNA, 195 bp, Homo sapiens; identical to SEQ ID NO: 8

SEQ ID NO: 933 - DNA, 162 bp, Homo sapiens
  misc_feature 11: n = A,T,C or G
ttcatggaccnccattcgctgttggcaagaaacggctttacttacaaaacagactctttaccttctgctgtgtttgaagtatgtttagtcagcatgctcaggaaataaatgtgaattgccctggaaaaaaaaaaaaaaaaaaaaaaaaaaaaaagcttgtac

SEQ ID NO: 934 - DNA, 500 bp, Homo sapiens
acaaaaaaagcaccagcaactgataaaaattgcttttttgtgcgctacccaactggttaaagccaatgtgatcttttatggtgaaactcctaagaaacaggtggttttgctggaaacttggtagacccttaattatagtggtgctaatgagcactactgtaatataaagccaccattattttttatcaaacatctgaatacattttacaaaggctattgtgagggcattattttgagcatctattttgaggtgatgtttaaaaaaactttaacatcaaatcaaattgtaaattaatttaaatatattgccttaaggacctactaaagaatgtgccaccagactttaagtgatagttgcaatatccttgtctaaaaaaaaaaaaaaaaagttgacttaaacattttctttaacagttgttttttttttctaaattcagtctttctcttgcttttttttccctgctattgaggaagtattttgccttccctactcactgaga

SEQ ID NO: 935 - DNA, 483 bp, Homo sapiens
  misc_feature 12, 21, 70, 117, 118, 217, 289, 374, 399: n = A,T,C or G
acagttagggtnacactttanaggtttattatttttaaaaaacttttcttgaactcctggccggcatggngaaaccccgtctctactaaaaataccaaaattggccgggcgtgatgnngggtgcctgtggtctcagctacttggggggctgaggcaggagaactgcctgagcccgggaggcggaggttgcagtgagtcgagatcgtgctactactgnctgggtggcaagggtgagactccatctcaaaaaagaaacaaaaaaacccaaaaagttttctttactgttggntaaaaaaaaaagccagaccatagtttgactggtggcatggaatttgtgtatcaaataaatgcatttgcttatttgacaaaccatnagtgtccactatttgttaccagagntgggccactatcttttaaaattgctggtgaaaacttgccactagatggcagtgcctgtatagatggggaaaaaattgccaccat

SEQ ID NO: 936 - DNA, 199 bp, Homo sapiens
  misc_feature 19, 20: n = A,T,C or G
actgcggcgggtaggcctnngactgtgggggcaatgaatgaagcgaacagattttcgttcattttggttctcagggtttgttataattttttatttttatgggctttggtgagggaggtaagtggtagcttgtgtttaatatttttagttgggtgatgagaaatagtgtaaggagtatgggggtaattatggtgggcca

SEQ ID NO: 937 - DNA, 546 bp, Homo sapiens
  misc_feature 501: n = A,T,C or G
acagatggggtcttgctatgttgcccaagctggtcttaaactcctggcctcaagcaatcctcctgccttggccccccaaagtgctgggattgtgggcatgagctgctgtgcccagcctccatgttttaatatcaactctcactcctgaattcagttgctttgcccaagataggagttctctgatgcagaaattattgggctcttttagggtaagaagtttgtgtctttgtctggccacatcttgactaggtattgtctactctgaagacctttaatggcttccctctttcatctcctgagtatgtaacttgcaatgggcagctatccagtgacttgttctgagtaagtgtgttcattaatgtttatttagctctgaagcaagagtgatatactccaggacttagaatagtgcctaaagtgctgcagccaaagacagagcggaactatgaaaagtgggcttggagatggcaggagagcttgtcattgagcctggcaatttancaaactgatgctgaggatgattgaggtgggtctacctcatctctg

SEQ ID NO: 938 - DNA, 465 bp, Homo sapiens
actcatcttttcccagatgaccaagatgctagacctgctagaggatttcttggaacatgaaggttataaatacgaacgcatcgatggtggaatcactgggaacatgcggcaagaggccattgaccgcttcaatgcaccgggtgctcagcagttctgcttcttgctttccactcgagctgggggccttggaatcaatctggccactgctgacacagttattatctatgactctgactggaacccccataatgacattcaggcctttagcagagctcaccggattgggcaaaataaaaaggtaatgatctaccggtttgtgacccgtgcgtcagtggaggagcgcatcacgcaggtggcaaagaagaaaatgatgctgacgcatctagtggtgcggcctgggctgggctccaagactggatctatgtccaaacaggagcttgatgatatcctcaaatttggcactga

SEQ ID NO: 939 - DNA, 500 bp, Homo sapiens
  misc_feature 16: n = A,T,C or G
actgtcttcccagttncgtccattctttgaattacaagatgatctaaaaccatcttctttttcgccctttcaagaatatcttcttcaactgatccctttgtaactagacgataaatattcacctgtttcttttgcccaattcgatgggctctagcctgtgcctgaagatcattctgtggattccaatcggaatcaaatataacaacagtgtcagcagaggctaaattaatccctagacctccagctcttgtggacagcaaaaagcaaaaatcctctgatccctcagcattaaaatgatctagagcttgtttcctcagttctccttttattgatccatctaatctttgaaaggggaattgacgatatttcaaatattctgcaagtatatctaacatccgcaccatttgtgaaaaaataagaactcgattgcctcgttctcttaggcgaattaatagcttgtcaagaagaatcaattttccgctactacgaattaagtgttg

SEQ ID NO: 940 - DNA, 306 bp, Homo sapiens
acgacatctcagacatgacttctattgccaggctggtcaagtggcagggtcatgagggagacatcgataagggtgctccttatgctccctgctctggaatccaccagcgggctatctgcgtttatggggctggggacttgaattggatgcttcaaaaccatcacctgttggccaacaagtttgacccaaaggtagatgataatgctcttcagtgcttagaagaatacctacgttataaggccatctatgggactgaactttgggacacactatgagagcgttgctacctgtggggcaagagcatgt

SEQ ID NO: 941 - DNA, 477 bp, Homo sapiens
  misc_feature 15, 16: n = A,T,C or G
acaaacttacagtanngtatattccaaataaaggtttttcttcctactatggtatgacaatataactgttttctgaatgaagatacatgttaaggcttaaggtgtaaacactttggaaggcaaacagcttagtgaaaaaaattatggttcatttaaaaatgtgtatcatttcataatagacccctgaactttcaaatttacatgtgagaatacatttacatcttaactttctaggaaaggcacaggctttatgtaaaaaagcagcaaagttttaaacccaccaatatattgacaaagccattacttttattagaaacaaataatgcttctcaaggtgttggcaacatgtcatagtatcaacatatacttcatacagtgtatttctccctttaattatattccggtaggaggtggaatacctccttggctatgaggggcagatgtatttgatggactgtgtaggctggttctccttgt

SEQ ID NO: 942 - DNA, 537 bp, Homo sapiens
  misc_feature 16: n = A,T,C or G
actaaaatactgtccnaattttagcatttttattttgcactttgtgtggattgaggtgttcagaaataccaaccataaaaatgtaatctagttggcaaaggtgtgcgctaaaacacggaaccgaacatgcattgatttggataacttttgagggtttttgtcaaatagcatgtgaagagttacatttttcttaaaagattggtggtcccaatgtcagagttcttggaacagataactgaatgatagatttttttttttaaagataaaactttacaacctgcacatttgttatgcatactaaatggtgtgttaaaattagggtttctttgcctctctacactacactaatctgcctaaaggtggttgtttcatatttataatgctaattatcatacctacctactttaaattttaggtagaaaattatctgatttaaatacaaacatatttttctcacattgagtaatatgcataatgtagttccaaatgtatttcattactatagtcacaatatccaactaaaaattacgctatcta

SEQ ID NO: 943 - DNA, 224 bp, Homo sapiens
atggcgctgtcgaccatagtctcccagaggaagcagataaagcggaaggctccccgtggctttctaaagcgagtcttcaagcgaaagaagcctcaacttcgtctggagaaaagtggtgacttattggtccatctgaactgtttactgtttgttcatcgattagcagaagagtccaggacaaacgcttgtgcgagtaaatgtagagtcattaacaaggagcatgt

SEQ ID NO: 944 - DNA, 329 bp, Homo sapiens
  misc_feature 16, 305, 320: n = A,T,C or G
acaatataatgtctcntcagcaaaaaaaaaaaaattgaaattacagattatttaaaacagtatcagttttctattccttcttgtatactgacattcttaaccgtcatagcagttgatgcagaaaagccgcatgtcgtgtgttagtaagtgatgccagatacaaatggtttggtctgtagagttaatgtggagctgcactgtggctgcagcaagatcataatatgcgatctgtttaataaaggttagccccatctcgggcacttctaagagtcaagagtcagggtaaccaccagaagtaaatgganagagaatggtgtcangatattggt

SEQ ID NO: 945 - DNA, 360 bp, Homo sapiens
acctggggcttttggagaacgtccgagtgcggagggcaggctacgccttcaggcaggcctatgaaccttgcctagaaagatacaaaatgctttgtaaacaaacatggcctcattggaaaggaccagccaggtctggtgtggaggtcctatttaatgaattagaaattcccgtggaagaatactcctttggtagatcaaagatattcatccgaaacccaagaacattattcaaattagaagacctgaggaagcaacgcctggaggacttggccactctcattcagaagatatatcgggggtggaaatgccgcacacacttcctgctaatgaaaaaaagccaaattgtgattgccgcctggt

SEQ ID NO: 946 - DNA, 334 bp, Homo sapiens
actcaatattataaaaacctcaaataattgacttgattttacacaacatccttcccttttctacaagttaatttttttacaaatcatttgggttatctcctaaataggttatattttattgcttctagaaacaatgtttcaaaatatatgtgcattatcagtaataatttgtataaatatttcccacaacaattttcataattttcaaagactaatttcttgactgaagatattttgctagggaagtgaaactttaaaattttgtagattttaaaaaatattgttgaatgatgtcatgcaaaggatttatatagtgtgctcccactaactgtgt

SEQ ID NO: 947 - DNA, 396 bp, Homo sapiens
  misc_feature 14, 16, 17, 96, 125, 126, 178, 260, 339, 340, 342: n = A,T,C or G
cctgtgggtttatnanntatgggtttatatcctcaaatacgacattctagtcaaagtcttggtaatataaccaatgttttcaaatgtattctgttntacaaagagcagatttttattgaacttgnncaataactatattaccatacaatataaatattcatgaatagtttcccaagtntggagcgaccacatagggagaaaatgtaaatgtctcaatttttgttcacaaaagtatattttatcaaattgctgtaagctgnggatagctttaaaagaaaaaaaagtttcctgaaatctgggaaacaagacatttaaagaatcagcaaaattttcaaaatnnanaaaattatgaaaatattatcctcattagttcatttagtcccatgaaattaatta

SEQ ID NO: 948 - DNA, 195 bp, Homo sapiens; identical to SEQ ID NO: 8

SEQ ID NO: 949 - DNA, 405 bp, Homo sapiens
  misc_feature 16, 17, 18, 386: n = A,T,C or G
acattattcatcgtgnnngcattcttgctaattttttttttggctttggaatgtgacacagcctttttgatcatttctttgatgtgaaaagcatctttggttatcagttaaattgaggtggacattatttccccaatttcacaacaggattcacattgttaatttataaatctagacttggagaattaaggactgagaaatgaccatatcttaaactatctacgacaaagtgaacttaaaaggacatgcccactgaattcaggtcctttgagtaaaaaaaaaatcttctgctgcacattttgtttaagtgttactgtttctgcctgttaatgctgggaacacaaatagtgcaatttgtgcaattggagaatcttgccttttttctnggctccccccaaaaataca

SEQ ID NO: 950 - DNA, 279 bp, Homo sapiens
acatagcataaaaactctgcagagaagtattcccaataaggaaatagcattgaaatgttaaatacaatttctgaaagttatgttttttttctatcatctggtatgccattgctttatttttataaattattttctcattgccattggaatagatatctcagattgtgtagatatgctatttaaataatttatcaggaaatactgcctgtagagttagtatttctatttttatataatgtttgcacactgaattgaagaattgttggttttttctttttt

SEQ ID NO: 951 - DNA, 616 bp, Homo sapiens
  misc_feature 583, 603: n = A,T,C or G
acttcagttggtgcacaaaatactgtcatttgctcaaagctggctgccaaatgtttggtgatgaaggcagaaatgaatggcttaaaacttgggagaagagcaaaacctgaaggggccctccagaacaatgatgggctttatgatcctgactgcgatgagagcgggctctttaaggccaagcagtgcaacggcacctccacgtgctggtgtgtgaacactgctggggtcagaagaacagacaaggacactgaaataacctgctctgagcgagtgagaacctactggatcatcattgaactaaaacacaaagcaagagaaaaaccttatgatagtaaaagtttgcggactgcacttcagaaggagatcacaacgcgttatcaactggatccaaaatttatcacgagtattttgtatgagaataatgttatcactattgatctggttcaaaattcttctcaaaaaactcagaatgatgtggacatagctgatgtggcttattattttgaaaaagatgttaaaggtgaatccttgttttcattctaagaaaatggacctgacagtaaatggggaacaactggatctnggatcctggtcaaactttanttattatgttgat

SEQ ID NO: 952 - DNA, 354 bp, Homo sapiens
  misc_feature 13, 17, 173, 180, 185, 193, 214, 226, 237, 338: n = A,T,C or G
acctgtgggtttntccncctatgggtttatatcctcaaatacgacattctagtcaaagtcttggtaatataaccaatgttttcaaatgtattctgttatacaaagagcagatttttattgaacttgtgcaataactatattaccatacaatataaatattcatgaatagtttnccaagtntggancgaccacntagggagaaaatgtaaatgtntcaattttttgntcacaaaagtntattttatcaaattgctgtaagctgtggatagcttaaaagaaaaaaagtttcctgaaatctgggaaacaagacatttaaagaatcagcaaaatttcaaatnaaaaattatgaaaata

SEQ ID NO: 953 - DNA, 419 bp, Homo sapiens
  misc_feature 13, 14: n = A,T,C or G
acctgtgggtttnntacctatgggtttatatcctcaaatacggcattctagtcaaagtcttggtaatataaccaatgttttcaaatgtattctgttatacaaagagcagatttttattgaacttgcgcaataactatattaccatacaatataaatattcatgaatagtttcccaagtctggagcgaccacatagggagaaaatgtaaatgtctcaatttttgttcacaaaagtatattttatcaaattgctgttaagctgtggatagcttaaaagaaaaaaagtttcctgaaatctgggaaacaagacatttaaagaatcagcaaaattttcaaataaaaaattatgaaaatattatcctcattagttcatttagtcccatgaaattaattattttctctgcttgatcttggtggaca

SEQ ID NO: 954 - DNA, 390 bp, Homo sapiens
  misc_feature 296, 297: n = A,T,C or G
acttgtctggtcagctgtgtatgatcagttatctacctcagagtctattttcttttgtgctgggacaggttgctggccctccctgtttccacagaccaaatcctcctagctcaggagctagggctaagcagttatttctttcaagtattttttagttcttaaattttatgcttgtatttgatgatagatgtcagtgacatttcatagtttcaaaagtccttgctgctctgagaagtgtagattctagtgaaaattacatagtcataagagaaatgtgtttttgtttttgtttttgnntcatttttttaaagttgtggtattattggttctatgctccctggaatattactgctttgtgaaagtccagactgaacgcagcaccctctgtgt

SEQ ID NO: 955 - DNA, 512 bp, Homo sapiens
  misc_feature 16: n = A,T,C or G
acctgtgggtttattncctatgggtttatatcctcaaatacgacattctagtcaaagtcttggtaatataaccaatgttttcaaatgtattctgttatacaaagagcagatttttattgaacttgtgcaataactatattaccatacaatataaatattcatgaatagtttcccaagtctggagcgaccacatagggagaaaatgtaaatgtctcaatttttgttcacaaaagtatattttatcaaattgctgtaagctgtggatagcttaaaagaaaaaaaagtttcctgaaatctgggaaacaagacatttaaagaatcagcaaaatttcaaataaaaaattatgaaaatattatcctcatttagttcatttagtcccatgaaattaattattttctctgcttgatcttggtggacagtttcatgaagctgtcagttagttcattaaagtttttggaaatttctcagacagtgcagtggtatcagaaacttgtatttcaagagcacctcg

SEQ ID NO: 956 - DNA, 445 bp, Homo sapiens
acctgtgggtttattacctatgggtttatatcctcaaatacgacattctagtcaaagtcttggtaatataaccaatgttttcaaatgtattctgtcatacaaagagcagatttttattgaacttgtgcaataactatattaccatacaatataaatattcatgaatagtttcccaagtctggagcgaccacatagggagaaaatgtaaatgtctcaatttttgttcacaaaagtatattttatcaaattgctgtaagctgtggatagcttaaaagaaaaaaagtttcctgaaatctgggaaacaagacatttaaagaattagcaaaatttcaaataaaaaattatgaaaatattatcctcattagttcatttagtcccatgaaattaattattttctctgcttgatcttggtggacagtttcatgaagctgtcagttagttcatt

SEQ ID NO: 957 - DNA, 574 bp, Homo sapiens
  misc_feature 519: n = A,T,C or G
accttatattgaaaaagtttataaaacataattcctaaaaacaacctcaacattagacaatagaggaaggaaaaacatcagacaaagcctaagttttcacatgagaaactaagtatgttcttaaagctccagtattacattccttgaaaaaactcagaatgcactttggtcattattaaacatatttgaacataggcaaataaaatgaaatgctttctgttgtttttcatagaaagaaaaaacatactacacaatgaggctgaattgaggctgatcaaaaggaatggtaagagcaaagtgatatgacatggctctgttctccacacattcctgattttaagattatgatttagggattagaactgcaccaatcaaataaattatttacaattaatcgtcttaaagttcttaaaatatggtaaaaatatgaggatattccacatgatacactttgcaccaagaaaattctagattgtttcaaataaatttttagaaaccagatgcccagtttaaaaaaanttgcaaaaactgttttcatgtttcatgtaatttctaaaatactcgattgtacctg

SEQ ID NO: 958 - DNA, 502 bp, Homo sapiens
  misc_feature 451, 464: n = A,T,C or G
actacacgcgcctgggcaacgacttccacacgaacaagcgcgtgtgcgaggagatcgccattatccccagcaaaaagctccgcaacgagatagcaggttatgtcacgcatctgatgaagcgaattcagagaggcccagtaagaggtatctccatcaagctgcaggaggaggagagagaaaggagagacaattatgttcctgaggtctcagccttggatcaggagattattgaagtagatcctgacactaaggaaatgctgaagcttttggacttcggcagtctgtccaaccttcaggtcactcagcctacagttgggatgaatttcaaaacgaacaagcgcgtgtgcgaggagatcgccattatccccagcaaaaagctccgcaacaagatagcaggttatgtcacgcatctgatgaagcgaattcagagaggcccagtaagaggtatctncatcaagctgcangaggaggagagagaaaggagagacaattatgttcctga

SEQ ID NO: 959 - DNA, 509 bp, Homo sapiens
  misc_feature 16, 17, 183, 221, 228, 353, 427, 428, 446: n = A,T,C or G
actcattgtcagatgnnccctctgagagcacagaggaggcaaaagcttctgtgggatgtgctagtcggctaaagcttcacagaggaggtggcaattgaaaatgagtcctgaatggggtagggtggttagggaattccatgagacaagacaaggggggcatggtgtgagaaaggcatggaagtnggaaccctcttcctatgacaggagatcattctgcttanagtgganagtgtggagagtgggagtagataattttggaaagctgggtgaagccagttgtggagaattgtttgaatattatcccattgaatacccagagccactaaatctttttttttactagaaaataattngggtccatatgaaagtctctattactgagtagtgtcaatgagggtgtggcaaaatggagcctttcacatcctannggtggccatttggtaatnacagatataagccttaaactatgtaaacccttgtcccaaaggaagtaattgaataaattgccc

SEQ ID NO: 960 - DNA, 220 bp, Homo sapiens
  misc_feature 20: n = A,T,C or G
actcaaaatataagcagctngaaactggctttaccaatcttgaaatttgaccacaagtgtcttatatatgcagatctaatgtaaaatccagaacttggactccatcgttaaaattatttatgtgtaacattcaaatgtgtgcattaaatatgcttccacagtaaaatctgaaaaactgatttgtgattgaaagctgcctttctatttacttgagtcttgt

SEQ ID NO: 961 - DNA, 495 bp, Homo sapiens
  misc_feature 14, 15, 364, 402, 409, 413, 419, 430, 438, 455, 473: n = A,T,C or G
attacctatgggtnngtatcctcaaatacgacattctagtcaaagtcttggtaatataaccaatgttttcaaatgtattctgtcatacaaagagcagatttttattgaacttgtgcaataactatattaccatacaatataaatattcatgaatagtttcccaagtctggagcgaccacatagggagaaaatgtaaatgtctcaatttttgttcacaaaagtatattttatcaaattgctgtaagctgtggatagcttaaaagaaaaaaagtttcctgaaatctgggaaacaagacatttaaagaatcagcaaaattttcaaataaaaaattatgaaaatattatcctcattagttcatttagncccatgaaattaattatttttctctgcttgatcttggnggacagntttnatgaanctgtcagtttngtttcatnaaaagttttggaaattntcagacagtgcagtggtntcagaaacttgtattcaagagt

SEQ ID NO: 962 - DNA, 385 bp, Homo sapiens
  misc_feature 16, 17: n = A,T,C or G
actgtagaatgtttgnnatacagtatttgtaaaattgatatgaaaaataatttctcaaagtctattgtttgatctagttattttaataaaggaactctagaagtttcaagtggccagtgaagtgtgaggaatagagagtaaaggaaataattaataatggtgaccctctgttaagtggtttactttttccattaatataaatttcatttggaaagattaaaaaaacaagtttgattgaacttgataaatcagaaatatttaccagctttgtcgatggtgtattcttgaaaaatgtttggttttctttcaggttgacttatatccaaaattctacaaattcttagctatgttataaatgtagaaagaagtgaaaaatcaaaatatg

SEQ ID NO: 963 - DNA, 539 bp, Homo sapiens
acacttggagctaggaaaccaaagcaagctttgtgaaactggcacagtgatagagaattgctgtggagagttatagagcaaagggatgggtccttgaggcctgccagtgtgtaaaggtgttcaaataaagggctgtttctacaggtaacattaaatgtgaactcaacacttccagagtctttaaagggtttctatgtgtatcggtgtaatagtgttttaccaccaactgcctttctttgttcctagttactgtaacaaatatttgatgatagaggtttattaattttgtttatccagaccattaattttatttgtttttgttctatgtaatcaaataaaatttgagtaacatgtaatggtaaggattaatgcatggttatttggaccagaaaaaagtgccatagaagaccaataactgtttagttgaggctagtctggaacctttcattagagcaatatttggttattgcacttcatttttatttactaagaaatgcaattttgggaattttttaacctgttatgctttgttatcaacc

SEQ ID NO: 964 - DNA, 259 bp, Homo sapiens
acccagccctgctgcagcgcaacggctcctttgccaactttctctgcaactatgcccccgatgaggaccaagggcacctggaggacagctggaccgcgttggaaggtgcagaggataaggaggcactgctgattgaagacacactcagcaaccacacggatctgacagacaatgatccagtcacctatgtggtccagaagcagtttatgagacagctgagtgccctgtcctcagatggggagggacagggtcggcctgt

SEQ ID NO: 965 - DNA, 418 bp, Homo sapiens
  misc_feature 246, 253, 257, 382, 400: n = A,T,C or G
ctgctaatacaatgccagtcaggccacctacggtgaaaagaaagatgaatcctagggctcagagcactgcagcagatcatttcatattgcttccgtggagtgtggcgagtcagctaaatactttgacgccggtggggatagcgatgattatggtagcggaggtgaaatatgctcgtgtgtctacgtctattcctactgtaaatatatggtgtgctcacacgataaaccctaggaagccaattgatntcatagntcanaccatacctatgtatccaaatggttctttttttccggagtagtaagttacaatatgggagattattccgaagcctggtaggataagaatataaacttcagggtgaccgaaaaatcagaataggtnttggtatagaatggggtntcctccttcggcggggtc

SEQ ID NO: 966 - DNA, 342 bp, Homo sapiens
  misc_feature 198: n = A,T,C or G
actatgttatgcacacattacaaataatataaggggaagttttattagcttagtaggaaattgttattattaaggtttaaaaatgagaacaggtgtgagttttccaaaatacttaaaaataatagtgtcaaaaattcaggggcagttaaggagtcatggatggaactagaggtcactatattaagtgacataagccanaaacagacaaacattgcatgttctcaattatttgcgggatctaaaagtcaaaacaattgaactcatggatatagagagtagaaggatggttactagtggctgggaaaaggggtgtgcgaggggaactggggatgcttaatgtgt

SEQ ID NO: 967 - DNA, 251 bp, Homo sapiens
acatcttccagagctgttttcatctctgcctacaggggtaaagtccgcatggaattagagggggaaagtctgcactggaacctgctgtggccattttttttctgttgttgctgcttctctagtggagttactgcagcttagggatggttcctggaagtggacacattttacaaaaacgttttttaaatacacgccagctcttcgagaagcacttttttccttccgtcatgcttcatactatattgtattgt

SEQ ID NO: 968 - DNA, 413 bp, Homo sapiens
  misc_feature 404: n = A,T,C or G
cctatgggtttatatcctcaaatacgacattctagtcaaagtcttggtaatataaccaatgttttcaaatgtattctgtcatacaaagagcagatttttattgaacttgtgcaataactatattaccatacaatataaatattcatgaatagtttcccaagtctggagcgaccacatagggagaaaatgtaaatgtctcaatttttgttcacaaaagtatattttatcaaattgctgtaagctgtggatagcttaaaagaaaaaaagtttcctgaaatctgggaaacaagacatttaaagaatcagcaaaatttcaaataaaaaattatgaaaatattatcctcattagtttcatttagtcccatgaaattaattattttctctgcttgatcttggtggacagnttcatgaag

SEQ ID NO: 969 - DNA, 341 bp, Homo sapiens
  misc_feature 12, 13, 14, 169: n = A,T,C or G
acccgtgggtcnnntacctatgggtttatatcctcaaatacgacattctagtcaaagtcttggtaatataaccaatgttttcaaatgtattctgtcatacaaagagcagatttttattgaacttgtgcaataactatattaccatacaatataaatattcatgaatagnttcccaagtctggagcgaccacatagggagaaaatgtaaatgtctcaatttttgttcacaaaagtatattttatcaaattgctgtaagctgtggatagcttaaaagaaaaaaagtttcctgaaatctgggaaacaagacatttaaagaatcagcaaaatttcaaataaaaaa

SEQ ID NO: 970 - DNA, 595 bp, Homo sapiens
  misc_feature 16, 17, 18: n = A,T,C or G
actttcctagatgacnnntcgagtcaacatgaagccttagctaaaatgaatgattcaggatattaatgagaaattctcacaaatgatatgcatttaggaaatgattttgctttccttaaatagttcgaaggcttgaaaataaactttttttttgcatttcttttagaatgtttggtcattaacaacttttaaccttatcttcctcttctccttagcccttaacagaccgagtccattctatttggaaataacaagaacttgatcagattattaaatcttggaaacctcatttttaccttataaagtgttaagtttcacgtgcatattctcttacaaatgtagtataaatgttatggatagatataaggaaatattggcatagtataggtaattagtgaaaagacacaacttcacaaaacataataaaagataaacatgaaactataacactacttaaaaaatattttctcccaaaatttattttagcatttttgactagtttaataatatgaacactgccaaaaaatgggtttcaaagtcgcctggagaaacagttttcttcttctggagtccatctcagcagcagcgattttct

SEQ ID NO: 971 - DNA, 530 bp, Homo sapiens
  misc_feature 462, 478, 479: n = A,T,C or G
actccagcttggacgacagggcaagactctgtctcaaaaaaaaaaacaaaaaaaaaaaaaacaaagcagaagcattcttaccactgagttttaagaaggaaaaaaaaaagcaggttaaaattacttcagaaaagagagtcataatgagataaacatatcactttaaacgtaggcgtaattgaagatgtcttttagagatagattaatattgttttacttaggttaaatagaacaccattgaaagcttaatgtcacagattcacatttatgtaaatccttaacctctaaagtttttagaagcctaaattaaacatgattgattatcatctaaagctaatgttatttctgtctcctaacgtcagtaatatgaattgtaatgtgaattgttgaactttgatagtattttttaagtttaaaaatgtttttcttattagagtagtatagtattacatatttatggtngaatacagaaaagaanngagtgaaaatcatcccttgaatcacctaaatcctaaaataatgactaccta

SEQ ID NO: 972 - DNA, 546 bp, Homo sapiens
  misc_feature 20, 457: n = A,T,C or G
acttcagttggtgcacaaantactgtcatttgctcaaagctggctgccaaatgtttggtgatgaaggcagaaatgaatggctcaaaacttgggagaagagcaaaacctgaaggggccctccagaacaatgatgggctttatgatcctgactgcgatgagagcgggctctttaaggccaagcagtgcaacggcacctccatgtgctggtgtgtgaacactgctggggtcagaagaacagacaaggacactgaaataacctgctctgagcgagtgagaacctactggatcatcattgaactaaaacacaaagcaagagaaaaaccttatgatagtaaaagtttgcggactgcacttcagaaggagatcacaacgcgttatcaactggatccaaaatttatcacgagtattttgtatgagaataatgttatcactattgatctggttcaaaattcttctnaaaaaactcagaatgatgtggacatagctgatgtggcttattattttgaaaaagatgttaaaggtgaatccttgtttcattctaagaaa

SEQ ID NO: 973 - DNA, 284 bp, Homo sapiens
  misc_feature 19: n = A,T,C or G
accttgtaatgaagaggcngctgatgccatgcacttgtctgagggcatagctccatgtcttctgacattcctggtgtcccaaagaatagcaaaaagccagtttgaatattatgtaacttatttttttaatgtggacaggggaccttgaaaatcactaagttattaaaaatgtggatgtgctagaattggatatgtccaggaacatgggaagggctcactattggaatcccatgagtttccattttgtctctacccaaacgtattccaaagctgactgcatttgt

SEQ ID NO: 974 - DNA, 489 bp, Homo sapiens
  misc_feature 286, 454, 455: n = A,T,C or G
tgtagcaagagaaaaaccttatgatagtaaaagtttgcggactgcacttcagaaggagatcacaacgcgttatcaactggatccaaaatttatcacgagtattttgtatgagaataatgttatcactattgatctggttcaaaattcttctcaaaaaactcagaatgatgtggacatagctgatgtggcttattattttgaaaaagatgttaaaggtgaatccttgtttcattctaagaaaatggacctgacagtaaatggggaacaactggatctggatcctggncaaactttaatttattatgttgatgaaaaagcacctgaattctcaatgcagggtctaaaagctggtgtttattgctgttattgtggttgtggtgatagcagttgttgctggaattgttgtgctggttatttccagaaagaagagaatggcaaagtatgagaaggctgnnataaaggagatggttgagatgcatagggaactca

SEQ ID NO: 975 - DNA, 209 bp, Homo sapiens
actgtcttctttagatagagacgctataaaatttggctatcagtgagtaaatattagaatggccaagtttgccacttaattcatcccagaagaggaaaaataatagaagttgattaaatattttaaaatttaaaaatttttaaaaatttgagtatcaatacattattgcttataaatttcatgacattttcatatataaagtaaaaaat

SEQ ID NO: 976 - DNA, 332 bp, Homo sapiens
actatattcaagccactttcatatattaactagataaaaggataccatactgctatttgaaattcaatcacaaagcaaaaatgtcataattttaatgtattttaagggaagacggggttcttaacatgaatatgtaatacaaaaacaattctaaataataatatttaatagaagaaaaaatctgtataattatttagaagtaactctgtttttaaaatttcaatgttaggaagaaaatcccttaaatttgaaatagcggaatattctctcatatgaaaaaactgtgtcccagtgttattcttcaacttagaaattaggcaaagtattttagt

SEQ ID NO: 977 - DNA, 372 bp, Homo sapiens
  misc_feature 15, 16, 111: n = A,T,C or G
cccatttcaggaatnnaaaattaagtagaacaaaaaaacccagcgcacctgttagagtcgtcactctctattgtcatggggatcaattttcattaaacttgaagcagtcgnggctttggcagtgttttggttcagacacctgttcacagaaaaagcatgatgggaaaatatttcctgacttgagtgttcctttttaaatgtgaatttttatttctttttaattattttaaaatatttaaacctttttcttgatcttaaagatcgtgtagattggggttggggagggatgaagggcgagtgaatctaaggataatgaaataatcagtgactgaaaccattttcccatcatcctttgttctgagcattcgctgt

SEQ ID NO: 978 - DNA, 280 bp, Homo sapiens
ttttttttgactctacagggggtgctatagggtaaatacgggccctatttcaaagatttttaggggaattaattctaggacgatgggcatgaaactgtggtttgctccacagatttcagagcattgaccgtagtatacccccggtcgtgtagcggtgaaagtggtttggtttagacgtccgggaattgcatctgtttttaagcctaatgtggggacagctcatgagtgcaagacgtcttgtgatgtaattattatacgaatgggggcttcaatcgggagt

SEQ ID NO: 979 - DNA, 399 bp, Homo sapiens
  misc_feature 8, 9, 282, 283, 291, 300, 315, 339, 351, 355: n = A,T,C or G
accttatnngtttccccttccttgtcagcgtcgggaagatggtatgaagtcctctttggggcagggactctagtagatcttcttgtcagagaagctgcatggtttctgcagagcacagttagctagaaaggtgatagcattaaatgttcatctagagttaatagtgggaggagtaaaggtagccttgaggccagagcaggtagcaaggcattgttggaaagaggggaccagggtggctggggaagaggccgatgcataaagtcagcctgttcaaagtgctcnnggacttancaaaatganaagatgtgacctgtnccaaaaactatttttgagaatttnttaaatgtgacncatnttttctggtttatgaataaacttacagcaacaaataatcaaaga

SEQ ID NO: 980 - DNA, 298 bp, Homo sapiens
  misc_feature 33, 36, 39, 87, 216, 249, 250: n = A,T,C or G
gaacccgtggtcctccgcttcatgattttctgncgnctnttggcaaaaatggcaaataatgatgctgttctgaagagactggagcanaagggtgcagaggcagatcaaatcattgaatatcttaagcagcaagtttctctacttaaggagaaagcaattttgcaggcaactttgagggaagagaagaaacttcgagttgaaaatgctaaactgaanaaagaaattgaagaactgaaacaagagctaatnnaggcagaaattcaaaatggagtgaagcaaataccattttccatctggt

SEQ ID NO: 981 - DNA, 143 bp, Homo sapiens
  misc_feature 90, 129: n = A,T,C or G
acttttcctggactttgcctggacttttttctcccaaattagtatattctagtcatgcctaactatgctattctttgtctagatgaacangagaactgggcaacccatgatccacatctacctggacanggaaacaggaaagc

SEQ ID NO: 982 - DNA, 413 bp, Homo sapiens
  misc_feature 180, 181, 283: n = A,T,C or G
actgaggaaatattttgtaaagtgagctttgggtataacttagccccatcattatttagagaatagaggaggaagaaagaggaaggattttaaaggcagacaatgacagaccattcaggataggtagggttttaaagggagataaacacagtctcatcaactaaggagagatttgctgcnntaaataggatgagggaaatagtctgtgggatgcaagcaaaggaagcagggtgccttagacactgagtggagccagaaagatcatgcggcctttttccaagtncatggccaccaagtaagaatggttggttgacaagacaggaggctaaaacaggaaggtaatcttgtgcacctgacaaatagaaagaataaaggatcaaaattgaaggcaggctataagagtatcaagaaat

SEQ ID NO: 983 - DNA, 484 bp, Homo sapiens
  misc_feature 14, 204, 286, 325, 362, 369, 378, 422, 439, 440, 444, 458: n = A,T,C or G
acaaggtgcaaatnggaattccgattttagggcaacttttcagaggttgacagttaagtatttggggcatgcacaaatgtgatagttattttgctggaggtgacaggtatctcttaaatatcaacaatgccttttagttttcagtatgagatatagaaacagtctataatggagtaacattttaatgtctcaccattagagaanttggaaattaacatacatatgagactcctgcgttttagttaattggagaataagaatggctaatgtttctttgaggaccagncagtgattaccctatcactgagattgaataaattgtttnaaacatctttatttttgttgtattaaaattttaggtntaaattnatatatgcnatgattagatattgaaggttgtgaaatgtgaatgaaaacgtgtnaagtgaggcttcacaannaatnttattctctgtgtntcaaaagtatttgtcctattttaaaa

SEQ ID NO: 984 - DNA, 279 bp, Homo sapiens
  misc_feature 11, 159, 160, 225, 237, 247: n = A,T,C or G
acattcactangggcaaatgggtttttctaaataaatgacataaaaaagaactggttgtctttctttaaagaaagtcttagttacaggattctgtgattaaaatccttaaatattgggttgccttctgcagctgtagtatcagtttttgaaccacagtnntgggaagaaagacaaatggattcccttagaagtaagatttctatttgcaggatgagttgggcatnggaaagggtcanggttcatcangtgaactcaacactgggatgagactagaactt

SEQ ID NO: 985 - DNA, 453 bp, Homo sapiens
  misc_feature 300: n = A,T,C or G
accggtttttgtatataaaattcatgtttccaatctctctctccctgatcggtgacagtcactagcttatcttgaacagatatttaattttgctaacactcagctctgccctccccgatcccctggctccccagcacacattcctttgaaataaggtttcaatatacatctacatactatatatatatttggcaacttgtatttgtgtgtatatatatatatatatgtttatgtatatatgtgattctgataaaatagacattgctattctgttttttatatgtaaaaacaaaacaaganaaaatagagaattctacatactaaatctctctccttttttaattttaatatttgttatcatttatttattggtgctactgtttatccgtaataattgtggggaaaagatattaacatcacgtctttgtctctagtgcagtttttcgagatatt

SEQ ID NO: 986 - DNA, 475 bp, Homo sapiens
  misc_feature 469: n = A,T,C or G
acctttttttaaggagtgtaaactatgatatatgatttaagtaatcacttatttgaatgcaatattgattcagataggcataatctattcatttttcataatgaaatgtatattcctatttcaacactttatgcagattttacttatttcttacagggctgctgtgtggattcaatggcttatctatgtaagtgtccagcacagtatctggcacatagtaagcttttagtgtatgctacttatttatattaagtgagtcaatctgtcacttataatagaaaaactatctaatgcctcaggagaataatcaaaagataaacctacagatgtgtgacttctgttaaagtattatgcatccactatttcccaaattactaaactaattgttttaaaatgttacaatctatttttaagatcatatttgttctctatgtttttgctatggcctttggcctaaaccaatacaatnctgaca

SEQ ID NO: 987 - DNA, 444 bp, Homo sapiens
  misc_feature 427: n = A,T,C or G
acaaaaaagaactacttgtattctagaagaaatatgaaatgcttaatttataagcgggctggagattttttccaatattgttttctttgaaaatgaaaggggatcatctattttagttttggggtctgggaactttttgaaaatttaatttgtggaccaatgttttgtgaaagctaaagagggcaggggttaaaatagggcttgaatttctcattctgtatagaccagcaaacttccctgtgcaaggcaagtttacatcacaaatccaagaatgtttgcatcctaaatgctagtttgcttcagcccctagttaacctcaggacttggtttgcatataaaaggtagacagctgatatgttttcatgaataaatattgttcagccagaaaaggttggtgtcaggtaatgcatatttttttaagctttgntttatatttatttttca

SEQ ID NO: 988 - DNA, 464 bp, Homo sapiens
  misc_feature 16: n = A,T,C or G
accaattctctcttantttctttttttatagttggtttattttgcaattataaatgttaaacatccctagagatgaaagttaaaatggttgatcacagatcagtagcaaaatacaaattgacaattcaaaattataaataaaactctgttgaggatgtttaactttgagtctccaaatttaagagctaagcttggaagaaacaaatttataggttatatttccctcttaaattaaaaaacaaacttcctctggcagtagtttgtgaattcctttcattgtaatgataccatgattacaggatcaaaaatgcttaacttacttgccattctgctcacatcatcacagttgttttttttttttttaagcactcaatgtaggcattttaatcttctggataacagagtatcttttgagaaattaaaatcgaattgaccatttgcaatatttggttttcctaataggt

SEQ ID NO: 989 - DNA, 388 bp, Homo sapiens
acacaagattaacactacttatgaaatatggacaaatatattactactcattataacccatccagattattagtttaactcattcaattactacaaagatccttacagagctgaatttaatatacaatagaacatcactgccctctgatggtatcactaatatataattttaaattcagcaaacaaaaaatcctttatcataaagtaaaacagggtatgttaattttataagctacataaataaaaataaattggaaaaaattttacatctgcctaagaatactcattactaagttataaaaatttacagtgctccttcacatcagcccttcaaatgattttttcaagattctccctgatgatcagtttaaaggcactatgaagatgt

SEQ ID NO: 990 - DNA, 343 bp, Homo sapiens
gaccagaagcctgcatttctgcattctgcttaattccctttccttagatttgaaagaagccaacactaaaccacaaatatacaacaaggccattttctcaaacgagagtcagcctttaacgaaatgaccatggttgacacagagatgccattctggcccaccaactttgggatcagctccgtggatctctccgtaatggaagaccactcccactcctttgatatcaagcccttcactactgttgacttctccagcatttctactccacattacgaagacattccattcacaagaacagatccagtggttgcagattacaagtatgacctgaaacttcaagagt

SEQ ID NO: 991 - DNA, 466 bp, Homo sapiens
actaaacccccgctgaccaaggatcgaggagtagctgccagtgcgggaagtagcggagagaacaagaaagccaaacccgttccctgggtggaaaaatatcgcccaaaatgtgtggatgaagttgctttccaggaagaagtggttgcagtgctgaaaaaatctttagaaggagcagatcttcctaatctcttgttttacggaccacctggaactggaaaaacatccactattttggcagcagctagagaactctttgggcctgaacttttccgattaagagttcttgagttaaatgcatctgatgaacgtggaatacaagtagttcgagagaaagtgaaaaattttgctcaattaaccgtgtcaggaagtcgctcagatgggaagccgtgtccgccttttaagattgtgattctggatgaagcagattctatgacctcagctgctcaggcagctttaagacgtacct

SEQ ID NO: 992 - DNA, 422 bp, Homo sapiens
actacataacacattactatactactacaaaatatccttctctataaatgcactgaatattttcttgggcattttattaggccttttttagcattattacaaatgctaacaacaagatacttcaaaccaccaaatataaagtcagcttcttaattttctgaaatttagttatttgagttaataagaattctgtaggaatactgacccatctcttttcatccaaccttcaaaatagttaagcctatttgcccatctcacctaaccttcaaaatagttaaaacaaaaacaaacccaaactagctatatataacaagaatctttcaattcccaaactattgaaagaccctaagtcagccaatctatgaaattatacaagatgaaggtgaaaaagctgtgctttttttttaaaccattaaacccag

SEQ ID NO: 993 - DNA, 475 bp, Homo sapiens
  misc_feature 12, 15, 239, 288, 432, 439, 440, 466: n = A,T,C or G
acctgtgggttnatnacctatgggtttatatcctcaaatacgacattctagtcaagtcttggtaatataaccaatgttttcaaatgtattctgtcatacaaagagcagatttttattgaacttgtgcaataactatattaccatacaatataaatattcatgaatagtttcccaagtctggagcgaccacatagggagaaaatgtaaatgtctcaatttttgttcacaaaagtatattnttatcaaattgctgtaagctgtggatagccttaaaagaaaaaaagtttnctgaaatctgggaaacaagacatttaaagaatcaggcaaaatttcaaataaaaaatttatgaaaatattatcctcattagttccatttagtcccatgaaattaattattttctctgcttgatcttggtggacagtttcatgaanctgtcannttagttcattaaaagttttggaaatntctcagaca

SEQ ID NO: 994 - DNA, 362 bp, Homo sapiens
tcgagcggccgccggcgggtacaacaaaaaagggcattggcccagtttattcgtccaaagctgctcggagtggactcaggatgtgcgaccttgtttctgactttgatggcttctctgagaggtttaaagttctagctaaccaatacaaatctatataccccactttggaaatagacattgaaggtgaattacaaaaactcaagggttatatggaaaagattaaactaatggtgagagatggagtttattttctatatgaggccctacatggaccaccaaagaaaatcttggtagaaggtgcaaatgcagcactattagatattgattttgggacttacccttttgtaacctcttcaaattgt

SEQ ID NO: 995 - DNA, 370 bp, Homo sapiens
  misc_feature 18, 21, 188: n = A,T,C or G
acttatttcaacaattcntanagatgctagctagtgttgaagctaaaaatagctttatttatgctgaattgtgatttttttatgccaaattttttttagttctaatcattgatgatagcttggaaataaataattatgccatggcatttgacagttcattattcctataagaattaaattgagtttanagagaatggtggtgttgagctgattattaacagttactgaaatcaaatatttatttgttacattattccatttgtattttaggtttccttttacatttcttttttattatgcattctgacattacatatttttttaagactatggaaaaataatttaaagatttaagcctctggtggatgat

SEQ ID NO: 996 - DNA, 172 bp, Homo sapiens
gggtttatcacctatgggtttatatcctcaaatacgacattctagtcaaagtcttggtaatataaccaatgttttcaaatgtattctgtcatacaaagagcagatttttattgaacttgtgcaataactatattaccatacaatataaatattcatgaatagtttcccaagt

SEQ ID NO: 997 - DNA, 257 bp, Homo sapiens
  misc_feature 10, 54, 196, 202, 210, 211: n = A,T,C or G
tttccctgcntagtagaacaaaacagccctgtgcctttgctagagaaccgacantcaaacccttttctgtggaggatcaaggctgcctcattggagtgcccattgcccacctttgactgtattgttctcaaattaaccagatgaatgtcacaaggcaaagatgactgtaatggagagaattcaccttgcagctcangggtangtgaggannaacttatttgccattggaatgactggatgattcatgagtagaagaa

SEQ ID NO: 998 - DNA, 183 bp, Homo sapiens
acgcatcatgtggtctcagcgtgatccatcacttcgcaaaagtggagtaggcaacatattcattaaaaatctggacaaatccattgataataaagcactgtatgatacattttctgcttttggtaacatcctttcatgtaaggtggtttgtgatgaaaatggttccaagggctatggatttgt

SEQ ID NO: 999 - DNA, 369 bp, Homo sapiens
  misc_feature 274: n = A,T,C or G
acttctggaaaaaaatgcaaatggtttagccaggatctttcctgtctgattcgtcactattattatatctgatgatgcgaatggttggagcgattcaatcctaagtcattaatgagctattttataaacaccactgtctgaagatcttcatttacattttgctaaggatcacttcgctaacctcacaggcttgtgtcaacagcatgatttgcaggacttcagttacactcttataaacaacacggctgtattgttaatcggttaatattttatnaagtgtaaatattttattatgttttgaagggaactattgattctaaattattaaacccctgagaaggactatttaaatgaaatatacaattaagt

SEQ ID NO: 1000 - DNA, 349 bp, Homo sapiens
  misc_feature 115, 142, 144, 212, 215, 326: n = A,T,C or G
acaagctttttttttttttttttttttttttttgggattttaaaaatatttattacatttgtttctagaaatcatagaaaataaaaattgatacaattttgatatacaactttanaaaggcatatttatcctttcacaccananaagtttatgcaatgccagacatggaaataccaaagccactggtgacaaagggtaaacgctactgatanaanaaagccttgtccatttttatagttttcttctctaccattatttatttttgagcaaataccagtccagtggaaagagttctgaacataaaaggcacctagagtaaaaattanaccttaactaataaaacagctgt

SEQ ID NO: 1001 - DNA, 482 bp, Homo sapiens
  misc_feature 14, 456: n = A,T,C or G
acatctgtgtgccncgctggggcagactgtgccaatgctcaccaaacactagaatctgctcttacacctctagcatgtatctcgttgtagcagagttgtgcactttctcagcattgtgtagtgttttctaattgcatctaaaaacttatcaaaagtgattgtgaaaacagtgtcttagaagtataaacagaaatggcaatatttatgtcctgtgattcaagcccaaaggttataaattcaactttcacagggaatagcactgctaatcttactttatgatttaaatataaaggaaaatcacagcagccttaatttcctgttggtcggatcatttgcagcagttctagttcctgacttttaaaatggatgaaattttctctttgtctgattttggaaaaggaactgcttttttgccttactgctttggtataaggatgaaaaacatgagcactctgnagacaaaatgaccttaaatcacattg

SEQ ID NO: 1002 - DNA, 507 bp, Homo sapiens
  misc_feature 446, 492: n = A,T,C or G
gggggcccaagtccttctgatcgaggcccagcccctacccccaacagagagcctgccaatggcaccaacccctctgctgagctgcaccgtagtcctagcctcctataaggcccaggaagagggcagaggggccagaaggactccatggcccaaagaccctcctccctgcaggcactgtgggaacagacacagagatggagaagcagggacatgctgagaggacgaagccaaggaaattagggaggagagtcaaagggatcaaggagagttggggatttgagctgcagcagagagggatgagggatttagccctctgccctaaggtgccattgaaaagggacaggacccttcggaggtgcctgtgaggagaggggagcaggacctctccctcctccagatccctgcctcctagtgccagcccctcacacgccttcatcctgaaacangaagaggacggcaccaagtttgggggtgctggatgaaagagacgangggtgatctgtgagt

SEQ ID NO: 1003 - DNA, 213 bp, Homo sapiens
  misc_feature 12, 13: n = A,T,C or G
ctatttcatgtnnttgatcaaaaactatttgggatatgtatgggtagggtaaatcagtaagaggtgttatttggaaccttgttttggacagtttaccagttgccttttatcccaaagttgttgtaacctgctgtgatacgatgcttcaagagaaaatgcggttataaaaaatggttcagaattaaacttttaattcattcaagaaaaaaaaaa

SEQ ID NO: 1004 - DNA, 186 bp, Homo sapiens
  misc_feature 78, 118, 119: n = A,T,C or G
atgagtttgctaatacaatgccagtcaggccacctacggtgaaaagaaagatgaatcctagggctcagagcactgcancagatcatttcatattgcttccgtggagtgtggcgagtcnnctaaatactttgacgccggtggggatagcgatgattatggtagcggaggtgaaatatgctcgtgtgt

SEQ ID NO: 1005 - DNA, 221 bp, Homo sapiens
  misc_feature 114: n = A,T,C or G
tccaggagaccgtgcctgttccccacacacatgcgcccgatgatgcggcagccggcgatagacgcgtgcaccacggggatggtatcggagagctcgccctcgaacacactgtanaagttctctgagcctccgatcgctaccagacagtaggtgttggtgagcttggcaaagcagccgatctcacagttgttctcgaacgaagctcggaccgccatgaggcc

SEQ ID NO: 1006 - DNA, 482 bp, Homo sapiens
  misc_feature 13, 427, 451, 475: n = A,T,C or G
actttggcttttntttctttttttttgcacagaataataaatgaatccatgtagaaatgacctggaacaaaacatcttggtccattttgcctattgatttagtgataactatacatataattttatcttgctccatggcatttttataacataacatcattcaacataaatgtcctgttactattgacgtcacacaataaacacattaacagttctatcaatatcctcattcttctaaactgcattttaaagttgaaaacacctttttttaaaaaaagtaaatatatttcatttaaaaatttaatctcaattcaaattttttcagatatattctcagtaaaaatatactttggatcagattgactatttaaatgaattttatatatatatataaacacacacattaacagtttaaaaggtaaatgtntttttgcaaaagaagagaaattanggagtgctctgaaattcagtgtantgatgca

SEQ ID NO: 1007 - DNA, 468 bp, Homo sapiens
  misc_feature 17: n = A,T,C or G
acctgcaaattcttaanaatacctttaccaccagattagaacagtaagcataataaccaatttcttaataagtaatgtcttacaaataaaaacacataaaaaatagctttaaatgcattcttcacaagtaattcagcatatatttttatatcatgtttacttatgcttaagaattaaagcaagtatatttattactctgatggaaatatgggaaatctctcattcatgcaatatacagggataatattcaagcgaagggaaaattcccgctttttatttttgttaaatgtatccatatataatcatcgacatgacagatgaggaaacccatgaagtttcccactagtcagatatacattttcacttcatcagaagcacctgatatctacagctaatttataattagatactgtttcaatgaaaccaaaatgagccctacaagttcctataaacaaaagcttccaatgt

SEQ ID NO: 1008 - DNA, 534 bp, Homo sapiens
  misc_feature 18, 491: n = A,T,C or G
acttggagggagcctcanccctgtgcttaagacttacagctgattggatcgggccttctgggattacccaggataatctcccctaaagttacctgatgagggtctttaatttcatctgcaaaatggttccacatcactacccaaattgtgtttgaataacttgaagatttgacacaagggaaaagcagccatggctgatgaagtgccacaggcctataaccccagctactgggaggccgaggcaggaggatggcttgagcccaggagttaaagtgtagcctgggcaacatagtgaggcctcatctcaaaaaaatgagaagggccatagtgtggctatgttagctgtttcaggggacactagcacgtgtgtggcaaaaataaacctttaatgtcagcagctacgtgtgtggctagtggctgctctgttggacagcagaactctagggggttagccaatgtgaaaaggacgaatgcccagccgatgccagcangagtgagggatgtgggaggacaaagactttcctgcttccaagt

SEQ ID NO: 1009 - DNA, 451 bp, Homo sapiens
actcaaggtttaaccttaaaattaagatttccttaaccttaaccttaaaattgatattatattaaacatacataatacaatgtaactccactgttctcctgaatattttttgctctaatctctctgccgaaagtcaaagtgatgggagaattggtatactggtatgactacgtcttaagtcagatttttatttatgagtctttgagactaaattcaatcaccaccaggtatcaaatcaacttttatgcagcaaatatatgattctagtgtctgacttttgttaaattcagtaatgcagtttttaaaaacctgtatctgacccactttgtaatttttgctccaatatccattctgtagacttttgaaaaaaaagtttttaatttgatgcccaatatattctgaccgttaaaaaattcttgttcatatgggagaagggggagtaatgacttgt

SEQ ID NO: 1010 - DNA, 394 bp, Homo sapiens
accattggtggccaattgatttgatggtaagggagggatcgttgacctcgtctgttatgtaaaggatgcgtagggatgggagggcgatgaggactaggatgatggcgggcaggatagttcagacggtttctatttcctgagcgtctgagatgttagtattagttagttttgttgtgagtgttaggaaaagggcatacaggactaggaagcagataaggaaaatgattatgagggcgtgatcatgaaaggtgataagctcttctatgataggggaagtagcgtcttgaccatgaggggaacaagaaactacttctaacgggaagaagaaacactacggtcgattaaaaaaattattttgttacttcgaagtatgtcctatatggggaaaaaacgt

SEQ ID NO: 1011 - DNA, 175 bp, Homo sapiens
acttcacttaaagagaaagagcacaataaagaaccagattcaagtgtgagcaaagaagtagatgacaaggatgcaccaaggactgaggaaaacaaaatacagcacaatgggaattgtcagctgaatgaagaaaacctctctaccaaaacagaagcagtataggaccgacaagtgt

SEQ ID NO: 1012 - DNA, 629 bp, Homo sapiens
  misc_feature 591: n = A,T,C or G
acttggctcctttgagctacccttattttaagaattataaataggtgtcaacccacacaaagaacagattgtggattaccgtagggaaaaaaatagcttactcaacttactaaaagtttcaacaccaaaaaagatttaacttggctgaaagttctgaaacagctgagacacagaaccaggaagctataatttataatgaaatgttgatacatacttaaaagctactgcagctgtagctatactaaaataagatttcttcagggtttacttaccctgaaatgcaagaatacaagcataacaataatattactgtttttatatgcaccaatacctctctttaatatataaagctctacaacaaatacctctaataattttacaattaaattaagtccatacttctatactactttggtctcaacatttttaaaacatcaattaattttgaaaatttacaatttaacaacatgatcctatcaataacaagcacattttgtagtggattaaagacacattcaaccatgcaatccagtgttcaataccttaatgataaataacaatgctgattgacttttattttgaaaaatcatngaaaactggaataatcatctgagactcacagtgatcac

SEQ ID NO: 1013 - DNA, 552 bp, Homo sapiens
  misc_feature 514, 525: n = A,T,C or G
actatgaacaccagaacagaagagattttttactattatgacacaaacacagggaaagagggcaaactagacattgtaatgcataagatgcaggaaaaagtgcagagcattaactataacccttttgaccagaaactttatgtctataacgatggttaccttctgaattatgatctttctgtcttgcagaagccccagtaagctgtttaggagttagggtgaaagagaaaatgtttgttgaaaaaatagtcttctccacttacttagatatctgcaggggtgtctaaaagtgtgttcattttgcagcaatgtttaggtgcatagttctaccacactagagatctaggacatttgtcttgatttggtgagttctcttgggaatcatctgcctcttcaggcgcattttgcaataaagtctgtctagggtgggattgtcagaggtctaggggcactgtgggcccagtgaagcctactgtgaggaggcttcactagaagccttaaattaggaattaangaacttaaaantcagtatggcgtctagggattctttgt

SEQ ID NO: 1014 - DNA, 162 bp, Homo sapiens
acttgaagaggcggaaggcagccagccagcaggtgcggctctgctcatcttcactgcagaagatccgaagccccttgtggccatttcgaagcttgttgggcttgacacagaaaccgaagtcagtgggcatcccgtagagcttgcggccctgcgtcaccacgt

SEQ ID NO: 1015 - DNA, 601 bp, Homo sapiens
  misc_feature 69, 173, 179, 186, 187, 534: n = A,T,C or G
acagacagggtttcaccgtgttagccaggatggtctccatctcctaacctcgtgatccgcccgcctcancctcccaaagtgctgggactacaggcgtgagccaccgcgtccagccagctttgactatttttatactcctcacaattctcaagcacttcttaggcagagcacanaaacanaaacaannaaaaaaacttagaaatatatgaatgcaagagatgggaagaggaaagaccatttcccaactagctcagagtagcctgatcgtaactccaaacagttcacaaaattctcttaggctgaaaccattcatctttcctaaacgtccctcatgtctgctaaaatcactttcccaaatgccttgtatctaggaatctgatgcctactgagcttaccttttatcaaattaatagtgactcaatctccattactggaaagcaggcactttaaccttgtagctctaaaacagaaatagtttttaactgatttcagttggaaaacccagcaattttaacaaaaagggggaggggcagnccaaatagcatttggaaaatgttaaaattttattattttacattctttaaccattatagttactgca

SEQ ID NO: 1016 - DNA, 273 bp, Homo sapiens
cccgagcgccgctccggctgcaccgcgctcgctccgagtttcaggctcgtgctaagctagcgccgtcgtcgtctcccttcagtcgccatcatgattatctaccgggacctcatcagccacgatgagatgttctccgacatctacaagatccgggagatcgcggacgggttgtgcctggaggtggaggggaagatggtcagtaggacagaaggtaacattgatgactcgctcattggtggaaatgcctccgctgaaggccccgagggcgaaggt

SEQ ID NO: 1017 - DNA, 305 bp, Homo sapiens
  misc_feature 76, 77, 83, 91, 92, 176, 219, 255: n = A,T,C or G
actggctcctcatctcactcgggcttatgccaaagatgtaaaatttggtgcagatgcccgagccttaatgcttcanngtgtanaccttttnnccgatgctgtggccgttacaatggggccaaagggaagaacagtgattattgagcagagttggggaagtcccaaagtaacaaaanatggtgtgactgttgcaaagtcaattgacttaaaagataaatncaaaaacatttggagctaaacttgttcaagatgttngccaataacacaaatgaagaagctggggatggcactaccactgctactgt

SEQ ID NO: 1018 - DNA, 156 bp, Homo sapiens
acaacggccagccaattaccaaaatggcctgtggggctgaattcagtatgataatggactgcaaaggaaacctctattcctttgggtgccctgaatatggtcagctgggacacaactcagatgggaagttcatcgcccgggcacagcggatagagt

SEQ ID NO: 1019 - DNA, 520 bp, Homo sapiens
actcatgcccgactgtctaccaggcacacagactttgaggagagggcgtatgtcgtcttgatccgcatcaatgatgggggtcggccacccttggaaggcattgtttctttaccagttacattctgcagttgtgtggaaggaagttgtttccggccagcaggtcaccagactgggatacccactgtgggcatggcagttggtatactgctgaccacccttctggtgattggtataattttagcagttgtgtttatccgcataaagaaggataaaggcaaagataatgttgaaagtgctcaagcatctgaagtcaaacctctgagaagctgaatttgaaaaggaatgtttgaatttatatagcaagtgctatttcagcaacaaccatctcatcctattacttttcatctaacgtgcattataattttttaaacagatattccctcttgtcctttaatatttgctaaatatttcttttttgaggtggagtcttgctctgtcgcccaggctggagtacctcggc

SEQ ID NO: 1020 - DNA, 195 bp, Homo sapiens
acgcccttttcctaacactcacaacaaaactaactaatactaacatctcagacgctcaggaaatagaaaccgtctgaactatcctgcccgccatcatcctagtcctcatcgccctcccatccctacgcatcctttacataacagacgaggtcaacgatccctcccttaccatcaaatcaattggccaccaatggt

SEQ ID NO: 1021 - DNA, 514 bp, Homo sapiens
  misc_feature 90, 415, 422, 443, 494: n = A,T,C or G
ttttttttttttttctgaaaaagtcatggaggccatggggttggcttgaaaccagctttggggggttcgattccttccttttttgtctanattttatgtatacgggttcttcgaatgtgtggtagggtggggggcatccatatagtcactccaggtttatggagggttcttctactattaggacttttcgcttcgaagcgaaggcttctcaaatcatgaaaattattaatattactgctgttagagaaatgaatgagcctacagatgataggatgtttcatgtggtgtatgcatcggggtagtccgagtaacgtcggggcattccggataggccgagaaagtgttgtgggaagaaagttagatttacgccgatgaatatgatagtgaaatggattttggcgtaggtttggtctanggtgtancctgagaataggggaaatcantgaatgaagcctcctatgatggcaaatacagctcctattgataggacatantggaagtgagctacaacgta

SEQ ID NO: 1022 - DNA, 556 bp, Homo sapiens
  misc_feature 19, 444, 522: n = A,T,C or G
acagtgggagaaatcacanatgccctgaaaaaggtatttggtgaacataaagcgaatgatcgaatggtgagtggagcatatcgccaggaatttggagaaagtaaagagataacatctgctatcaagagggttcataaattcatggaacgtgaaggtcgcagacctcgtcttcttgtagcaaaaatgggacaagatggccatgacagaggagcaaaagttattgctacaggatttgctgatcttggttttgatgtggacataggccctcttttccagactcctcgtgaagtggcccagcaggctgtggatgcggatgtgcatgctgtgggcgtaagcaccctcgctgctggtcataaaaccctagttcctgaactcatcaaagaacttaactcccttggacggccagatattcttgtcatgtgtggaggggtgataccacctcangattatgaatttctgtttgaagttggtgtttccaatgtatttggtcctgggactcgaattccaaaggctgccgttcangtgcttgatgatattgagaagtgtttggaaaaga

SEQ ID NO: 1023 - DNA, 376 bp, Homo sapiens
acatatatcccgatgtgtctgtgtgaatctttgtcttttttgggggagggcagagggcggttctttttttagatattgttcctaaaaaggaataaatgcatacacctgtttgtcaaaacacctttgctttttgtgcaactgctttatattaacgatactaaaaaaaatagctttggaaaaaaaactactgtatgtaacggaattgcagaatatgctgcacatgtattttatttagttatccttgctttaagaatattggatgacatttcctgacatgtgggagggagaaactccctaacttttttttttctgcttttaaactgtaacatagttgaagattttcttttttctgttctcattgattggagcattttgt

SEQ ID NO: 1024 - DNA, 185 bp, Homo sapiens
  misc_feature 11, 12, 109: n = A,T,C or G
acctgtgggtnnatcacctatgggtttatatcctcaaatacgacattctagtcaaagtcttggtaatataaccaatgttttcaaatgtattctgtcatacaaagagcanatttttattgaacttgtgcaataactatattaccatacaatataaatattcatgaatagtttcccaagttctggag

SEQ ID NO: 1025 - DNA, 173 bp, Homo sapiens
  misc_feature 15: n = A,T,C or G
ttttttttggctctngagggggtgctatagggtaaatacgggccctatttcaaagatttttaggggaattaattctaggacgatgggcatgaaactgtggtttgctccacagatttcagagcattgactgtagtatacccccggtcgtgtagcggtgaaagtggtttggttta

SEQ ID NO: 1026 - DNA, 494 bp, Homo sapiens
actgagcaggattaccatggcaacaacacatcatcagtagggtaaaactaacctgtctcacgacggtctaaccccagctcacgttccctattagtgggtgaacaatccaacgcttggtgaattctgcttcacaatgataggaagagccgacatcgaaggatcaaaaagcgacgtcgctatgaacgcttggccgccacaagccagttatccctgtggtaacttttctgacacctcctgcttaaaacccaaaaggtcagaaggatcgtgaggccccgctttcacggtctgtattcgtactgcggcgggtaggcctaggactgtgggggcaatgaatgaagcgaacagattttcgttcattttggttctcagggtttgttataattttttatttttatgggctttggtgagggaggtaagtggtagcttgtgtttaatatttttagttgggtgatgagaaatagtgtaaggagtatgggggtaattatggtgggcca

SEQ ID NO: 1027 - DNA, 251 bp, Homo sapiens
  misc_feature 163, 164: n = A,T,C or G
caagtttgaatttcagagaaacaatttcacgttaagaatgtttcatgcaatatttggcatatatttacagtaaaagcattcattatttgtctgaaattcaaatttaactgagcatgctggtttttctcattgtttggtttttctaaatctggcaatcctacanntgtggtcatgggaaatcacctacagcatgttaaagtcctctagttcatcatctcgtcacctgaaatggaagtcctttttccctcacc

SEQ ID NO: 1028 - DNA, 496 bp, Homo sapiens
  misc_feature 17, 18, 309, 444, 455, 456: n = A,T,C or G
accctcttcaagaatcnnatggatgtcgttttgaagggcggcaatcttcctcagtatagaggggtgaacattcggagattgctcaacggtagcatcgtggtcaagaacgatgtcatcctggaggcagactacactttagagtatgaggaactgtttgaaaacctggcagagattgtaaaggccaagattatgaatgaaactagaacaactcttcttgatcctgattcctgcagaaaggccatactgtgctatagtgaagaggacactttcgtggattcatcggtgactccgggctttgacttccaggancaatgcacccagaaggctgccgaaggatatacccagttctactatgtggatgtcttggatgggaagctggcctgtgtgaacaagtgcaccaaaggaacgaagtcgcaaatgaactgtaacctgggcacatgtcanctgcaacgcannggcccccgctgcctgtgcccaaatacgaacacacactggt

SEQ ID NO: 1029 - DNA, 192 bp, Homo sapiens
actttacaacagaaaggaaggcaggcaagtaggacaggttgctaagcagcaagtagcaagcctagaaaccaatgatcctattttaggatttcaggcaacaaatgagagattatttgttcttactaccaaaaacctctttttaataaaagtaaatacagagaattaattattctaacatattggcctctttgt

SEQ ID NO: 1030 - DNA, 221 bp, Homo sapiens
actgcttgttctctgtggaggagatgattaaaataaaaatcccagaaggacaggaggattctcaacactttgaatttttttaacttcatttttctacactgctattatcattatctcagaatgcttatttccaattaaaacgcctacagctgcctcctagaatatagactgtctgtattattattcacctataattagtcattatgatgctttaaagctgt

SEQ ID NO: 1031 - DNA, 306 bp, Homo sapiens
  misc_feature 187, 236, 274: n = A,T,C or G
acagtgcccattccacgagggtggctgactttcaccttatgaaatactgcttaatgaagtatgaacaacccgaatgcttccctgtttcccaggagcgatttgcattttgaaagagaagtgtgttaatccagctggaatttgcctggatagtggagtcttcccagctgggcggggggacggtcttcancaggacattttctttctttatgctgcagcctcatcatgggaacattcantaagaacttgctcacccttctaccaccaaatctaccancccacttgcacctttagccacatcctgttaca

SEQ ID NO: 1032 - DNA, 352 bp, Homo sapiens
  misc_feature 10, 15, 16, 35, 88, 145, 158, 291, 310, 311, 313: n = A,T,C or G
acacccccanggttnnaccgaacacgtaatgctgnaattggaaataaggacattaaattcaaacatttggaagaagcctttacatcanaacactggcttgttaggatatataaagtaaaagcacctgataacagggagacattanatcacaaacctcnagtcaccaacattttcccaaaacagaagtatttgtcaaagaagactaccaaaaggaagcgtggctacattaaaaataagctggtttttaagaaaggcaagaaaatatctaagaagactgtttaaatgcactgntctggttcctaacttgaannanttgtccttgtgagaaccggtctttgcctttagctcatgt

SEQ ID NO: 1033 - DNA, 385 bp, Homo sapiens
  misc_feature 293, 318, 335: n = A,T,C or G
gtgttgagagcttctcagactatccacctttgggtcgctttgctgttcgtgatatgagacagacagttgcggtgggtgtcatcaaagcagtggacaagaaggctgctggagctggcaaggtcaccaagtctgcccagaaagctcagaaggctaaatgaatattatccctaatacctgccaccccactcttaatcagtggtggaagaacggtctcagaactgtttgtttcaattggccatttaagtttagtagtaaaagactggttaatgataacaatgcatcgtaaaaccttnagaaggaaaggagaatgtttttgtngaccactttggtttttntttttttgcgtgtggcagtttttaagtttattagtttttttaaaatcagt

SEQ ID NO: 1034 - DNA, 401 bp, Homo sapiens
acctgttgctaggatctaataattttctcctgtgagtcactgcgcctggcccttttaataatttttaacagcaaaatttccttttggaattttagctggaagaattatttgatgcctggctgaaggtgatttcctgaagagggaatatatgtttgcctcttcctgaggtctgggggcactaacatttagggtcctttaaatttcgtttgagttttgtcagccaaaatcagaaaatattaattcaggctgcaaatttctgtgcagactgagatgtggttatttcttaacagcatttttcccttccctctacccagcactaatgctttggatgtatgagtttccttacagatccccaggaaactgactgagaaagtaaacacctttatttctagtttacctgt

SEQ ID NO: 1035 - DNA, 195 bp, Homo sapiens; identical to SEQ ID NO: 8

SEQ ID NO: 1036 - DNA, 287 bp, Homo sapiens
  misc_feature 12: n = A,T,C or G
acactgatctgncatcgcaccactgcactccggcctgggcgacaaagtgagactgtctaaaaaataataataataaaaagcattttgaaattagtcgcggtcaatgcaattctactctttggaatccgtttagctaaatgaatgtagtgctcttgttgaatggaaacaggtgataggaaatgcctaccatttgactcaatatggataatcaagagttgctcaggatgcttggatctgggggtagattctcatttcatcattgccctggcacatgtcaattactacat

SEQ ID NO: 1037 - DNA, 346 bp, Homo sapiens
  misc_feature 17, 54, 98, 99, 163, 233, 297, 324: n = A,T,C or G
acccagacaggatcatnaacacgtttagtgtggtgccttcgcccaaagtgtcanacacagtggtggagccctacaacgccaccctctcagtccaccanntcgtagaaaacacagacgagacctactgcattgataacgaagctctctacgacatttgcttcanaaccctaaagctgaccacgcccacctatggtgacctgaaccacctggtgtctgctaccatgagtggggtnaccacctgcctgcgcttcccaggccagcttcaatgctgacctgcggaagctggctgtgaacatngtcccgtttccccggctgcactttttnatgcccggctttgccccactga

SEQ ID NO: 1038 - DNA, 252 bp, Homo sapiens
actgccaggggacagtgttgcctctgttgagccttggctgctgtgggaagctgtaggttcctgactgaggcctgaggtggtggtgctgtcagggaacgctattgtgtgcgttgggcctggtcggctgtgggaggtggttgatttttcactgacgcctgagcttgtcgtgcgggcaggtgagagtgttctgtctggtgatctggggctactgtagaaggtggtagatttctcactcaggcctgctgttgtggt

SEQ ID NO: 1039 - DNA, 431 bp, Homo sapiens
actggatgggcttgtaaactacccaactatgatgctagggaaattgtgaacaatgtcagacgaatgctagatggcctggatcctcatcccatgcttccaaactacaaaaactttaaaggcacgattcaagaacttggtcaaaaccagtatgcagtcagtggtgaaatatttgtagtggacagaaacacagtagaaattacagagcttccagttagaacttggacacaggtatataaagaacaggttttagaacctatgctaaatggaacagataaaacaccagcattaatttctgattataaagaatatcatactgacacaactgtgaaatttgtggtgaaaatgactgaagagaaactagcacaagcagaagctgctggactgcataaagtttttaaacttcaaactactcttacttgtaattccatggt

SEQ ID NO: 1040 - DNA, 178 bp, Homo sapiens
  misc_feature 23, 84, 94, 95: n = A,T,C or G
gctgcgtggcaggagaggttcanattttcccctggacggtaattggcctttgagggggaaatggtggggacatctgggccatanaggacattcnnggtgactgggtcactgcggttgacactcgctgggttctgtatttcacattcataggatcctgcatcgttccctttgacgctga

SEQ ID NO: 1041 - DNA, 195 bp, Homo sapiens; identical to SEQ ID NO: 8

SEQ ID NO: 1042 - DNA, 150 bp, Homo sapiens
  misc_feature 15, 16: n = A,T,C or G
acatactggcctctnngattacatagatcagccattaaaataaaacaagccttaaaaaaaaaaaaaaaaaaaaaaaaaaaaaaaaaaaaaaaaaaaaaaaaaaaaaaaaaaaaaaaaaaaaaaaaaaaaaaaaaaaaaaaaaaaaaaaaa

SEQ ID NO: 1043 - DNA, 603 bp, Homo sapiens
  misc_feature 453, 464, 520: n = A,T,C or G
accaaaggatagctgttctgtttaagtagggacctctcatggcctacaggctttgacatctgagaatcaaactggagaacattccgaagccgttcttataagtgtctccatctctacctgggctgaaatggaatgtgcaaatgtagcccagcctggtccttgggtgttgccagttgattgatgactgggagccaaagtggcatctcctttgacctaaacgggcgatgatgaaataaaactcaacagcctttctctcatcttgcattgtgagatgcgaaatagagcgtgtctctctgcctctcattttaggctgaggccgtccaaagcggccatgccccatgtttccactagatggcgctgacacttcaggcatcaaccctcatggcctctcagccttgcaaaggcagccacttaaagtcggtgtcccgtgtggggcaccaagctgagctgcanacacccagtangcgcgaggcaaatgcgtcccattttaagaggcttgtatttatgagctctttgcttnctccctcccactatcttttaaagaattgctctccatctcctttggcaaagttcctttgccctttgtcttatttttgtgaaacc

SEQ ID NO: 1044 - DNA, 342 bp, Homo sapiens
accgcggccgttaaacatgtgtcactgggcaggcggtgcctctaatactggtgatgctagaggtgatgtttttggtaaacaggcggggtaagatttgccgagttccttttactttttttaacctttccttatgagcatgcctgtgttgggttgacagtgagggtaataatgacttgttggttgattgtagatattgggctgttaattgtcagttcagtgttttaatctgacgcaggcttatgcggaggagaatgttttcatgttacttatactaacattagttcttctatagggtgatagattggtccaattgggtgtgaggagttcagttatatgtttggg

SEQ ID NO: 1045 - DNA, 177 bp, Homo sapiens
  misc_feature 97, 121, 122, 161, 162: n = A,T,C or G
accattggtggccaattgatttgatggtaggggagggatcgttgacctcgtctgttatgtaaaggatgcgtagggatgggagggcgatgaggactangatgatggcgggcaggatagttcnnacggtttctatttcctgagcgtctgagatgttagtattnnttagcttttgttgtg

SEQ ID NO: 1046 - DNA, 186 bp, Homo sapiens
  misc_feature 17, 20, 127: n = A,T,C or G
actggatggacctctcncanacagcatggaggcagtggcgttcaacaagcactatcagatcaatgacatctacagttgcagctggggaccagatgacgatgggaagacagtggatggcccccatcancttggaaaggctgccttacaacatggggtgattgctggtcgccagggctttgggagcat

SEQ ID NO: 1047 - DNA, 134 bp, Homo sapiens
  misc_feature 14, 68: n = A,T,C or G
acacactgaagtgnctctgtgtcacacaggtatttcttggtcctctggagagcagaggactcactcanctctttgcttcatgcctcgctttaatggtagtaaacacttaaccagtggaatagtctgactgctgg

SEQ ID NO: 1048 - DNA, 448 bp, Homo sapiens
  misc_feature 17: n = A,T,C or G
acattggaagcttttgnttataggaacttgtagggctcattttggtttcattgaaacagtatctaattataaattagctgtagatatcaggtgcttctgatgaagtgaaaatgtatatctgactagtgggaaacttcatgggtttcctcatctgtcatgtcgatgattatatatggatacatttacaaaaataaaaagcgggaattttcccttcgcttgaatattatccctgtatattgcatgaatgagagatttcccatatttccatcagagtaataaatatacttgctttaattcttaagcataagtaaacatgatataaaaatatatgctgaattacttgtgaagaattgtatttaaagctattttaaatgtgtttttatttgtaagacattacttattaagaaattggtttattatgcttacttgtttctaatctggtggtaaa

SEQ ID NO: 1049 - DNA, 338 bp, Homo sapiens
acttaaaaagttttttaaaaaataattaaatgcactactcatctcaatgaaatttttcgttttcctattttctagaactttctaaaaaaggaaacaaagcaaaaacaacaacaaaaaaacctgtttgacttaaggacacttgctgatcttgacacttgataatactttaagaaatggaaaggttttcctaaatctaatacctgcttaatataatccactttggaagattcatctgaaagaaacatagggtttgatttttaatactaatataaaataatctgccttccaatcaaaacaaaaatgttttcaactgtatacgctcctcggttgtgttttgt

SEQ ID NO: 1050 - DNA, 392 bp, Homo sapiens
acatatttaacactcagcttctataattagaaacaaatggcccatctggtttcatctaggcctctttgctatcctttcatctccaactggattattttaaagcaaattctagatgacattctgctgagcatttctgccagaattacacctctctttgctaatgtgaaaaaatgcccatgataactgtaaaatacgtgtgtcctatttaggtgtctaaacactttaatgtcacagtattaaggccttaaaatatagcttagatatatttttctaaattaaaagacttcattttttagatatacagaaaattgagcagaaaacagtgagttcccatataccttcttcatcccaacaagtttttccccctcattaacatattgtgttagtgtggt

SEQ ID NO: 1051 - DNA, 369 bp, Homo sapiens
actgattgagggtggcgttcgcctgctcgtagtttttactgacttccctcgtgtgaagtccgatgcttgcgttgcgcagggccagggtgtcatagatgcatgagctatctccgtcacagttggagatcaaatgttcagcccaggagctgtttttttgcagttgtgagtagaaaacaggggtgaagttggaaggcagctggtcattcctcttgccaaggaggcctgtcccgttgatctgccaggtcattccaaagtggaaaagcatctcctcagggctccctgggggaatggtggagccattgggcatcctgaagtcgtcctctggattgttattccagacccccaggagcccctccgtgcggttctggt

SEQ ID NO: 1052 - DNA, 184 bp, Homo sapiens
  misc_feature 15, 171, 179: n = A,T,C or G
acctgtgggttcatnacctatgggtttatatcctcaaatacgacattctagtcaaagtcttggtaatataaccaatgttttcaaatgtattctgtcatacaaagagcagatttttattgaacttgtgcaataactatattaccatacaatataaatattcatgaatagttncccaagtntggta

SEQ ID NO: 1053 - DNA, 356 bp, Homo sapiens
acatgaaactccagcagatttaatattggcatccatcatctagtcagacctctcacatgttcttcaaatcaatcaaatttgggattctcaacattttctgtgtcaataaaaggtgtggaattagtagattcgatgaagacctgtttttccttgccacattggacttccagacgccatttggattgggtttagaagatggggaaatttagaagacgtttcttggcctgagtctcttaagagtagagatgcagaagagagagtgagaccacgaagagactggctgttgactgcagggcaccaccagccaccttggtggtggcattagttggatttggggccaacccagagttggaagt

SEQ ID NO: 1054 - DNA, 518 bp, Homo sapiens
acggtttaatgttaatgcaaatgacagtatcctgcatagcatcatagtttcacccattctattttaggtgaggggatatggaggagatggggcagtgatctacaaatgggaagagacatctaagggacagtcctattgccaaggaaaaaccatttggggaagcctactgccccaaagaacaattctggtctaggctgcagcactgtcaccttaggcagctgcaagctctctccccttcaggcccttgtttgtaaaggcaaggcagagaaccatactcaacgtgtgagagagcactccgcaaatgccacggctgcgcatgggcgtttaagatcaccacggggctcccaaatcatggaccaagcaagttcaggagatgcggtgcagatggctgcacatggtaggaaatgcttcctgggctgctgtcctaaaggcagaattcagcctggcccttctctgggccccagttaccctctcagtggctcacaggtcagtatccgtaacaaacatgttttttcttc

SEQ ID NO: 1055 - DNA, 195 bp, Homo sapiens; identical to SEQ ID NO: 8

SEQ ID NO: 1056 - DNA, 363 bp, Homo sapiens
  misc_feature 248, 259, 279, 312, 351: n = A,T,C or G
ccgccttttacttccgcccgcttcttctggtcactccgccaccgtagaatcgcctaccatttggtgcaagcaaaaagcaatcagcaattggacaggaaaagaatggcattgaagcagatttccagcaacaagtgctttgggggattgcagaaagtttttgaacatgacagtgttgaactaaactgcaaaatgaaatttgctgtctacttaccaccaaaggcagaaacaggaaagtgccctgcactgtnttggctctcangtttaacttgcaacagaagncaaaaattttatattcaaaatctggttatcatncagtctgcttcagaacatgggtctttgttgtcattgctnccagataccagc

SEQ ID NO: 1057 - DNA, 73 bp, Homo sapiens
  misc_feature 10, 11, 14, 50: n = A,T,C or G
actgcggcgnntangcctaagattgtgggggcaatgaatgaagcgaacanattttcgttcattttggttctca

SEQ ID NO: 1058 - DNA, 504 bp, Homo sapiens
  misc_feature 491: n = A,T,C or G
acgatggggataatatactggcaagctactttgcagagttggtttaaggataagaatgtatgagaagtatactgagttcctaagaaggaaaacctcaaaacacggtggctatcattaaaatgttttaagttcttcataaaaataacatattattcctcaaattacagaggtctctaatagtgatggggaaaaattgttctttgcaaaatagaaatatttttccactatttctgaacctaacaactttgaaagcattcagcagtttctctaagattatttaaagcaaagcgctcatgatgtattttacaattagatactcttagatacgtgttctctgtgctgagtcttaagcaattgccagattcaccaattagttttttaaaagtagaaaacattttaatcaactcaactgaaaagcgttttagggggaaatcaataattttggtaagtgggttaacagtaaacattagcggctgacttttgcacagcanatagattctagtg

SEQ ID NO: 1059 - DNA, 275 bp, Homo sapiens
acgacgagtcgggcccctccatcgtccaccgcaaatgcttctaaacggactcagcagatgcgtagcatttgctgcataggttaattgagaatagaaatttgcccctggcaaatgcacacacctcatgctagcctcacgaaactggaataagccttcgaaaagaaattgtccttgaagcttgtatctgatatcagcactggattgtagaacttgttgctgattttgaccttgtattgaagttaactgttccccttggtatttgtttaataccctgt

SEQ ID NO: 1060 - DNA, 350 bp, Homo sapiens
acaggggtggcaaaatatgcctgacggatcatttcaaacctttgtgggccaggaatgtgcccaaatttggactagctcatctcatggctctggggctgggtccatggctggcagtggaaatccctgacctgattcagaagggcgtcatccaacacaaagagaaatgcaaccaatgaagaatcaagccactgaggcagggcagagggacctttgataggctacgatactattttcctgtgcatcacacttaactcatctaactgcttccccggacaccctccacctctagttgttactaagtagctgcagtaggcattgctggggaagaaacaaacacacaccaaacagta

SEQ ID NO: 1061 - DNA, 154 bp, Homo sapiens
actggacaaagaaaactgatatttactataaagaaaatcccagccttctgtgctctgggcccccacagcaaacactgccaaggtcacgtcgacaggcaggctcaagtttccattggattccttccactttctgaaatagccttctgccctctgt

SEQ ID NO: 1062 - DNA, 385 bp, Homo sapiens
acactttatcccttcacctataacagcttgtattttcgtgtgcagttttatgattactcaaattgcacttgtagatatatcttaacaaacacttcatacaaaataagcataggattattttattcaccaaagtattgttaattagcagagctcaattctttggtgtcagtttatcaaatttaccttctaggttttgagtttattattaagaacctgcgtagacttattttattttttaatacataggatcttttgccagaaatgagggcatactggcctggcgtaattcactcgtttcccaatcgcagccgcttctggaagcatgagtgggaaaagcatgggacctgcgccgcccaggtggatgcgctcaactcccagaagaagt

SEQ ID NO: 1063 - DNA, 195 bp, Homo sapiens
acgcccttttcctaacactcacaacaaaactaactaatactaacatctcaggcgctcaggaaatagaaaccgtctgaactatcctgcccgccatcatcctagtcctcatcgccctcccatccctacgcatcctttacataacagacgaggtcaacgatccctcccttaccatcaaatcaattggccaccaatggt

SEQ ID NO: 1064 - DNA, 172 bp, Homo sapiens
acagaactaaattttttaaactttatttgctgttaaattctgtgaagtttcagttatctaaaataaatatacacaaatatgaaatataatgtttcagattgcaaggtaatatgtaatagtagtgtttgtaagatactcttgtctaatattaactagtagtattttgatttgt

SEQ ID NO: 1065 - DNA, 173 bp, Homo sapiens
actgggcacacctccagccctccctcttccactgaaggccattgcctattcctagaaagttctttcccaggtatgcagctttcagtttccacttcagaggccacagtgtctggggaacggactgcccccaatactaaagggagtcaaatctctttaattccgcactcctcagt

SEQ ID NO: 1066 - DNA, 343 bp, Homo sapiens
acacataaacctatttataaaacacatctctatgctttttttttttgcttctaaatataaattttgctatttagccatcagctaaatataaattttgctatttagccatcagctaaatgatctaaatgcaaaccccaaagtttccagttaaaagtataaaatctgcttctaaccacagcagcatactgcttcaagtattctcctcctatgtaaggtcgagataattttgtcacatatgaattttaggtggacatctcatttcctcacatattagacatcctgctggggtcacagcttctttgttccatttgtctttttttgttgttttttaataagacattgc

SEQ ID NO: 1067 - DNA, 147 bp, Homo sapiens
acacatttaactccccaggttaaacaccctgtaatttaccttgaagctctttacattctgaagttatataaaattaagcaggaaaacattaacattaaatgaaaatcaattttgcacaaataagtgtgatcaagtagcttaaatcac

SEQ ID NO: 1068 - DNA, 218 bp, Homo sapiens
  misc_feature 11, 12, 14: n = A,T,C or G
acaaactttannancaatgttagtatgtcataaaatataacattacagcttatttaaaaccaaatatagttgaacatatttaaaatacattttcacagaatggatgaattagttgtttcttcagagttacttatgaacagttgaatgctttaaaatgttctgtctgtaggtaacatctaaaacacaagtgggtttattttaaatttttaaaatttgaa

SEQ ID NO: 1069 - DNA, 490 bp, Homo sapiens
  misc_feature 14, 443, 468: n = A,T,C or G
acaggattccttanagggtgaggccagagtgttcctggaccccaacatactgtctgacgatggcacagtggcactccgaggttacgcgttcagcgaagatggtgaatattttgcctatggtctgagtgccagtggctcagactgggtgacaatcaagttcatgaaagttgatggtgccaaagagcttccagatgtgcttgaaagagtcaagttcagctgtatggcctggacccatgatgggaagggaatgttctacaactcataccctcaacaggatggaaaaagtgatggcacagagacatctaccaatctccaccaaaagctctactaccatgtcttgggaaccgatcagtcagaagatattttgtgtgctgagtttcctgatgaacctaaatggatgggtggagctgagttatctgatgatggccgctatgtcttgttancaataagggaaggatgtgatccaantaaaccgactctggtacctgcc

SEQ ID NO: 1070 - DNA, 200 bp, Homo sapiens
gtcttggtgaggtgccgccatttcatctgtcctcattctctgcgcctttcgcagagcttccagcagcggtatgttgggccagagcatccggaggttcacaacctctgtggtccgtaggagccactatgaggagggccctgggaagaatttgccattttcagtggaaaacaagtggtcgttactagctaagatgtgtttgt

SEQ ID NO: 1071 - DNA, 84 bp, Homo sapiens
acttattgtcgcaatttttttttttttttgatacagggtctcgctgtgttgccccaggctggagtgcagtggcactgatcacgt

SEQ ID NO: 1072 - DNA, 214 bp, Homo sapiens
actagaatcaattaattctttttccatccctatctgtggagtggtttccaagtatttcttttggaaaaatacgtgatagtcaagatgggggacaagtagagaaagaaaaataaaaaatagaactcctaaaggattctgtaatctttgaggtgccagcctttttaagaatggattttagcaaggcacttgataaaatctctcatgaagtcctcgt

SEQ ID NO: 1073 - DNA, 317 bp, Homo sapiens
gcatttacaactgctacaaaaatgccagcactccatcgacatgaagaagagaaattcttcttaaatgccaaaggccagaaagaaactttacccagcatatgggactcacctaccaaacaactttctgtcgttgtgccttcatacaatgaagaaaaacggttgcctgtgatgatggatgaagctctgagctatctagagaagagacagaaacgagatcctgcgttcacttatgaagtgatagtagttgatgatggcagtaaagatcagacctcaaaggtagcttttaaatattgccagaaatatggaagtgacaaagt

SEQ ID NO: 1074 - DNA, 68 bp, Homo sapiens
  misc_feature 10, 15, 16: n = A,T,C or G
ggcgggtacncctannactgtgggggcaatgaatgaagcgaacagattttcgttcattttggttctca

SEQ ID NO: 1075 - DNA, 369 bp, Homo sapiens
  misc_feature 355: n = A,T,C or G
actttattttaaatacattaatttttaaatgctgctcatctttttctcatctggtggcaaaatactagtgcaactttcatcaaaataaagtttaccacagatgtaaataaattttcccaattgaaaatggcccttcagtggccattaaataaaatttctcaacctaacttaagtgaaaaagaactggtggttgtcattataagcaaaaatataaagtattatagcatcatctacattgctccttacaacacaaactttgaaagaaccagagatgctttataggagttcagttggttttgagaaggcacatgggtgtggatttttttttttttttttaacattctagaaattttgncaccaccactcttt

SEQ ID NO: 1076 - DNA, 220 bp, Homo sapiens
actcaaaatataagcagcttgaaactggctttaccaatcttgaaatttgaccacaagtgtcttatatatgcagatctaatgtaaaatccagaacttggactccatcgttaaaattatttatgtgtaacattcaaatgtgtgcattaaatatgcttccacagtaaaatctgaaaaactgatttgtgattgaaagctgcctttctatttacttgagtcttgt

SEQ ID NO: 1077 - DNA, 291 bp, Homo sapiens
  misc_feature 246: n = A,T,C or G
gaagagtggaaatggggaactcccccagaggtggatactggggggcaggcctcccaagctgatggacatgagagtagggccctgacaggccttcctcctctcaaacctggcagatgggggcctctctggaagagggaggggccctgtcactgtccagagtctctttttacacttcacctccttctgcagtcagactgaaatataaaaaaggtggtggtggtggtgaaggggctggtggagatgtangaaccgatctgctatttttaatttcctgtgaggatagagacttgc

SEQ ID NO: 1078 - DNA, 418 bp, Homo sapiens; identical to SEQ ID NO: 310

SEQ ID NO: 1079 - DNA, 166 bp, Homo sapiens
atcatacatactttacaagcaagttaaatggagataaagttgaaatcatagaagatgcaaatgacctttcaaaatcaacacaatgtgttctgaaactttcgtgactaataccatgcatctgtgatcaatgaactatgtggttttgaatcggatgtagaccattagt

SEQ ID NO: 1080 - DNA, 345 bp, Homo sapiens
  misc_feature 13, 14: n = A,T,C or G
ttttttttttttnngtcttcaaatggcttttttaaagtgaaaattaacttagcatattaagacaaagacaatagaaataatatacataattttattacaaaattttttttaaaaaaacgaaatgcaacatcctaaaaaacccaaaatttactattgatactaattcctacaagtttgctgtgctaccatacacaagaaattaaaaaaaccattaaatatttaggaacattcaacatcagaagctgtaaaatctaactgtatgagtagcccatcaaaaagctacaacctgcattttttaaaagtattttctctacagagaatcttatcagctatacaaaaatctgt

SEQ ID NO: 1081 - DNA, 297 bp, Homo sapiens; identical to SEQ ID NO: 459

SEQ ID NO: 1082 - DNA, 512 bp, Homo sapiens
accaactaggagacacaataatcctattagtttgttctcccaaacccactccagtttatcaggtaatatgctctgtaaggttctttccaaccccattagcacatacatagattacctataatttcacctaatgtaatctaccttcctactgaggattgaggttttaacgtttgtttttttccccccactttcttgatcagtgattctcaaccatgtaggaattaatgaaaccaattctgtatcaccactgcaaccaagacagcaataccaagtgatatgtatttttcaaactaatgtcattttgttctctatactgtaaaaaacgagaagatgcagtcctcaacttagaactcaatactaggaagggtcaagttgtcaaaaaatgtctttcaacagtagaaaagtttgctttcaaattaaaaaacaaagcacgtattgcaaacatcgtgtaatgataaaattacagaaaaaaatatattcagaatgacccatggcattcacgccataccaga

SEQ ID NO: 1083 - DNA, 514 bp, Homo sapiens
acgaggtggctcgactgctcaacctcaccgagaggcaggtcaagatctggttccagaaccgcaggatgaaaatgaagaaaatcaacaaagaccgagcaaaagacgagtgatgccatttgggcttatttagaaaaaagggtaagctagagagaaaaagaaagaactgtccgtcccccttccgccttctcccttttctcacccccaccctagcctccaccatccccgcacaaagcggctctaaacctcaggccacatcttttccaaggcaaaccctgttcaggctggctcgtaggcctgccgctttgatggaggaggtattgtaagctttccattttctataagaaaaaggaaaagttgaggggggggcattagtgctgatagctgtgtgtgttagcttgtatatatatttttaaaaatctacctgttcctgacttaaaacaaaaggaaagaaactacctttttataatgcacaactgttgatggtaggctgtatagtttttagtctgtgtagtta

SEQ ID NO: 1084 - DNA, 480 bp, Homo sapiens
acaaagcagcaactgcaatactcaaggttaaaacattagaaaagcatttgtgtgacaggtatattacagtattatcaaaatattacattttcagacttacttagcagataatcatccaccagagcttaaatctttaaattatttccatagtcttaaaaaatatgtaatgtcagaatgcatataaaaagaatgtaaaaggaaacctaaaatacaaatggaataatgtaacaaataaatatttgatttcagtaactgttaataatcagctcaacaccaccattctctctaaactcaatttaattcttataggaataatgaactgtcaaatgccatggcataattatttatttccaagctatcatcaatgattagaactaaaaaaattttggcataaaaaaatcacaattcagcataaataaagctatttttagcttcaacactagctagcatctctaagaattgttgaaataagtacctcgg

SEQ ID NO: 1085 - DNA, 478 bp, Homo sapiens
gttctggggcttgtcctcctttctgttacggtccagggcaaggtctttgaaaggtgtgagttggccagaactctgaaaagattgggaatggatggctacaggggaatcagcctagcaaactggatgtgtttggccaaatgggagagtggttacaacacacgagctacaaactacaatgctggagacagaagcactgattatgggatatttcagatcaatagccgctactggtgtaatgatggcaaaaccccaggagcagttaatgcctgtcatttatcctgcagtgctttgctgcaagataacatcgctgatgctgtagcttgtgcaaagagggttgtccgtgatccacaaggcattagagcatgggtggcatggagaaatcgttgtcaaaacagagatgtccgtcagtatgttcaaggttgtggagtgtaactccagaattttccttcttcagctcattttgtctctctcacattaa

SEQ ID NO: 1086 - DNA, 257 bp, Homo sapiens
  misc_feature 15: n = A,T,C or G
actatagggtaaatncgggccctatttcaaagatttttaggggaattaattctaggacgatgggcatgaaactgtggtttgctccacagatttcagagcattgaccgtagtatacccccggtcgtgtagcggtgaaagtggtttggtttagacgtccgggaattgcatctgtttttaagcctaatgtggggacagctcatgagtgcaagacgtcttgtgatgtaattattatacgaatgggggcttcaatcgggagt

SEQ ID NO: 1087 - DNA, 265 bp, Homo sapiens
cacaccctgagcaagaaggagctgaaggagctgatccagaaggagctcaccattggctcgaagctgcaggatgctgaaattgcaaggctgatggaagacttggaccggaacaaggaccaggaggtgaacttccaggagtatgtcaccttcctgggggccttggctttgatctacaatgaagccctcaagggctgaaaataaatagggaagatggagacaccctctgggggtcctctctgagtcaaatccagtggtgggtaattgt

SEQ ID NO: 1088 - DNA, 375 bp, Homo sapiens
acaaaagcctcatgaaggtcctggagaaatggggaaaccagtcgtcattcctaaagaggatcaagaaaagatgaaagagatgtttaaaatcaatcagttcaatttaatggcaagtgagatgattgcactcaacagatctttaccagatgttaggttagaagggtgtaaaacaaaggtgtatccagataatcttcctacaacaagtgtggtgattgttttccacaatgaggcttggagcacacttctgcgaactgtccatagtgtcattaatcgctcaccaagacacatgatagaagaaattgttctagtagatgatgccagtgaaagagactttttgaaaaggcctttagagagttatgtgaaaaaactaaaagt

SEQ ID NO: 1089 - DNA, 364 bp, Homo sapiens
cccttagagtcttggttgccaaacagatttgcagatcaaggagaacccaggagtttcaaagaagcgctagtaaggtctctgagatccttgcactagctacatcctcagggtaggaggaagatggcttccagaagcatgcggctgctcctattgctgagctgcctggccaaaacaggagtcctgggtgatatcatcatgagacccagctgtgctcctggatggttttaccacaagtccaattgctatggttacttcaggaagctgaggaactggtctgatgccgagctcgagtgtcagtcttacggaaacggagcccacctggcatctatcctgagtttaaaggaagccagcaccatagcagagt

SEQ ID NO: 1090 - DNA, 346 bp, Homo sapiens
actagaactaccttaagtatgctgtgctttcttttcaagtgaggtatctatattgaggaaaaaaatcttataaattccttttacattaaactaatttaatacactattttgttttctgggctgaatttttaaatttttttcttacatttgatcactttctaattcaaaaattgtagcactacataggacatttaattctattactaaataggctccaaattacattatacagtttagaaaccatttcaatgaatggatttacaaaaaaaaaaaaaactgtccttttaaatgaaatgcaatataaaatactaatacacttttcttccaaaagtggaaatgcttaagt

SEQ ID NO: 1091 - DNA, 423 bp, Homo sapiens
  misc_feature 15, 16, 419: n = A,T,C or G
gcggtgtatagcacnnatggttaattctcaagctgctaacattcgatctggatggaagaacattttctctgtatttcatctagctgcatctgatcaagatgaaagcatagtggaacttgcattccaaacaaccgggcacattgtcacccttgtatttgaaaaacactttccagcgaccattgattctttccaggatgcagtgaagtgtttgtctgaatttgcgtgcaatgcagctttcccagacacaagtatggaagcaattcgacttattcgccattgtgcaaaatatgtgtctgatagacctcaggctttcaaggaatacacaagcgatgatatgaacgtagcacctgaagacagggtgtgggtgagaggatggttcccaattctctttgagttatcctgtatcatcaatagatgcnaatt

SEQ ID NO: 1092 - DNA, 405 bp, Homo sapiens
acatatatgtatatttccttttttaatacaggataataatatggggtcttgtccttcacctcttaagttcagggaacagtttgtcctgaccacacatatgttatcagtgtaatgctttatgaagctttagaaatgagctcatgactcattaaaaaataataaacgatgctattttaatattttcaaataaataatctgaggatgtgtttcatactttagcatcaacgctgagttgtgccttgtagaattgcattgtctatacatgcaaaagactattaagttaggatgaactagattccctaattacagtgaaattctatcttgcaaatgctatagaataacttgcattttaaagtgtatttgcacattttacatatgctatgtggttgcctttgggttttctgt

SEQ ID NO: 1093 - DNA, 330 bp, Homo sapiens
actgattttaaaaactaataacttaaaactgccacacgcaaaaaagaaaaccaaagtggtccacaaaacattctcctttccttctgaaggttttacgatgcattgttatcattaaccagtcttttactactaaacttaaatggccaattgaaacaaacagttctgagaccgttcttccaccactgattaagagtggggtggcaggtattagggataatattcatttagccttctgagctttctgggcagacttggtgaccttgccagctccagcagccttcttgtccactgctttgatgacacccaccgcaactgtctgtctcatatcac

SEQ ID NO: 1094 - DNA, 323 bp, Homo sapiens
cggcgacacctcgcagtcattcctgcggcttgcgcgcccttgtagacagccggggccttcgtgagaccggtgcaggcctggggtagtctcctgtctggacagagaagagaaaaatgcaggacactggctcagtagtgcccttgcattggtttggctttggctacgcagcactggttgcttctggtgggatcattggctatgtaaaagcaggcagcgtgccgtccctggctgcagggctgctctttggcagtctagccggcctgggtgcttaccagctgtctcaggatccaaggaacgtttgggttttcctagctacatctggt

SEQ ID NO: 1095 - DNA, 321 bp, Homo sapiens
acaagttctgtgcataagatccaaggaattgcttactaatctgtaggcaaccctctttctaatcagaatcctttattcctcggctgcagatgagatagggcacaatctgttgtaaacagggcactgttgttaaaccaggataatattcttaaattaagatcgttcttgttctattaaaaagactttcccaagtgtcttccatcactgagtatattctgctgacctcttaatttcataaattaactttcttttgattccatttttatggtggtgtccgcagttttgttttaaaaattggtttaaatttatataaaactctgt

SEQ ID NO: 1096 - DNA, 299 bp, Homo sapiens
  misc_feature 12: n = A,T,C or G
acagaaacatanagccttgtcttgactataaggtttagttggtgttttaataacaacaaaaaagcacaataagacacaaacactcttcaacaggtttactcaaacagcttcgctcaagaagaaaaaggcacagatttaaagggatgacaataatcattaagaatgaagtaaatggagactcagtcaaaaaatgatacttcatgaattaagtcaagaaaaacaaaagtctttcaaattatctgtcttccttaaaatgaatttttaaattaaattgtataaacatatgatataaagttggt

SEQ ID NO: 1097 - DNA, 225 bp, Homo sapiens
  misc_feature 120: n = A,T,C or G
accaattttttttttactgtgcttcaaataaatagaaaaatagttataatattgatcttcaactttgccattcatgcttctatgcatattaggctacgtattccacattgaaagcatganagtgtctaggcctttgaatggcatatgccatttctgggaaatgcatctggaggctaagtattgctttctacaaataattgccccctttgttttaaaaagaagaaa

SEQ ID NO: 1098 - DNA, 123 bp, Homo sapiens
  misc_feature 29: n = A,T,C or G
acctgtcaactgccctggcctgcccccangacccctatacctcccagcacagcaggcagcctccaggatcctatttagacctatggctcagcatctgttctgattcattgttgtcccctctgt

SEQ ID NO: 1099 - DNA, 190 bp, Homo sapiens
acttcaaagccagtttcctataagcctttttcaattcttcctgagtagcattgggtttgacccccaaaacatcgtagtaagttgtttctttcaccatcttctactgccggtgcgggctgaggccggtgtgtgagggagcgggaaggagcgccgagctgtgcgcagccggggtagttaccgctcctccgcc

SEQ ID NO: 1100 - DNA, 255 bp, Homo sapiens
acgtagtctaggccatatgtgttggagattgagactagtagggctaggcccaccgctgcttcgcaggcggcaaagactagtatggcaataggcacaatattggctaagagggagtgggtgttgagggttatgagagtagctataatgaacagcgatagtattattccttctaggcatagtagggaggatatgaggtgtgagcgatatactagtattcctagaagtgagatggtaaatgctagtataatatttatg

SEQ ID NO: 1101 - DNA, 385 bp, Homo sapiens
actctcagtggggaccacctgctttcatcccctgacattgtgggagaaattttgcaatgtatgctaatcaaaatgtatttatatgttctctgctgatgttttatagaggtttgtgaagaaaattcaacctcagcaacttcagaaactgcccctgatacgtgtgagagagaaataaaatcagattttgagtgttgaagggactgaggaagtgaggataaagagcatgaggacagcatggaaagaaggaggcagaagtggaactgaactttcactctccatgggacagatcaatctcattatcaagtctgaatagcaaccagccctctcctccaccccgtttctcctcagttaattggagctcagtcaggtgattattgagtcttgt

SEQ ID NO: 1102 - DNA, 237 bp, Homo sapiens
  misc_feature 119, 208: n = A,T,C or G
gaacaaggccctcctttctccaggcctgggctacgggggagggagagcctgaggctctgctcagggcccatttcatctctggcagtgccttggcggtggtattcaaggcagttttgtancacctgtaattggggagagggagtgtgcccctcggggcaggagggaagggcatctggggaagggcaggagggaagagctgtccatgcanccacgcccatggccaggttggcctcttct

SEQ ID NO: 1103 - DNA, 318 bp, Homo sapiens
acacctggcccctgaggacggacacctgcactttcccttccactcgctcctgggacttggcgatgtagtggcggacaaattcacactcagggctgtgccagaaaccggtatacaccagctcagcaaatttcaagcccaggccttgtttgattttgtgcacttcccggtccatggtgaaggcctcgatgtctaaatgagcatggtaaaggatggtgcctgctggggtctcgtagatacctcgggacttcattccaatgaagcggttctccacgatgtcaatacggcccacgccatgcttgcccgcgacttcgttcaggt

SEQ ID NO: 1104 - DNA, 422 bp, Homo sapiens
actatctggctgcagagactttcttaggtcccgtgttagaccccatggggtctcagcatgtggtcatgtggtaatgcattcctttcaaaggctttgggctgaactcaagttggaaatacctggaaaagaccaagcttctcctttgggtgtctgcggatcctattaaaaatattcgtgatgttttaagttctccaatacaattttctccacgaaaacaagcatcagatacactacctctaagtatttattggaggggttccaacagcctcgtggacaggccttctcagcagctactgagtgccccctaggggtggggaggggccagtgcacatggaggcaaaccacagagcccttttgtggcctattattatgaagaactaaaatgtggccagtgaaccagtcagtgctcatcactacggggc

SEQ ID NO: 1105 - DNA, 487 bp, Homo sapiens
acacaagtgatcaatttgtcacaacatgacaagttattgataacaagtattttaacttacaggtatgataaaagtctaacatttacaaaatggggatattactatataaaaaattgaaagtattagtttttgtgtaaaatattagtttcttcattctgatacagtgctaaacttaatgtaaagccaaacttcaggacctactctagacataaaataattttcatttccatgtctctagaatctaaaatgctaagtaaattttctctattacctttcgtcaaaataacttaaagtattaaaagacaacctaatgacagtaataacatttttctttcctaaaaaatatttggtatctgatttaaagacatgaataacacaatagtaacaacttaaagatcgacaagatatactaaaaatgatatttgggcatcatatctacataataattgtgaaacaactgttttcctaataactgagaagcaatcag

SEQ ID NO: 1106 - DNA, 172 bp, Homo sapiens
acaaagatttttttacacaaagaaacttaatgctgtattaataaattcagtgtgtagcttcaattgggatagttccaaaagtgaagattttgtgaggaataagtgcaaattttttttttattttaaaaaattctttgaaactcttaagtctttgtgtctgcaatgaaattgt

SEQ ID NO: 1107 - DNA, 281 bp, Homo sapiens
  misc_feature 109, 155, 204, 220, 251, 256, 267: n = A,T,C or G
acatatgtgtgagtgtgtgtatgtgtgtgtatgtgtgtgcgtgagtatgtgtgagtgtgtgtgtatgtgtgagtgtgtgtatgtatgtgtgagtgtgtgtgtggtgcancggatgacatactccgtctctgactcggtgagggccacgggctcangcgaggacttgaagaggggcccaagaccgcggaactctggcactgctgncaactgctcctggaanatctcctgcctggtagctgccactttctcangctgnttgactgctgngatgggggtacctc

SEQ ID NO: 1108 - DNA, 359 bp, Homo sapiens
  misc_feature 329, 333, 334, 340, 343: n = A,T,C or G
accacctggatgtggacctttgctacctgtattaataccagtggcctcattttgctgtatcattacaatttggcttcttatattaatgtttgaaaaggattaaagctggtattctagaacatgcccttcactggttgtgtaaataaaactgtagaatgacacttcagatgaagttagtgtgattttaattgtgcactacaaccgagctgtaaccagttactaattttagaatgtaatcccaggacaatattaagcaaatagcctgcagtgcttcctgtgaaatagtgaaggaggagggcatttctgtattccaggacttcttggggttncagnntgggtntgnatgatttttttttttt

SEQ ID NO: 1109 - DNA, 242 bp, Homo sapiens
  misc_feature 13, 160: n = A,T,C or G
gcgagacctccgngcccgaccatgtcgtctggtccctgttcaacaccctcttcttgaactggtgctgtctgggcttcatagcattcgcctactccgtgaagtctagggacaggaagatggttggcgacgtgaccggggcccaggcctatgcctccaccgncaagtgcctgaacatctgggccctgattctgggcatcctcatgaccattctgctcatcgtcatcccagtgctgatcttccag

SEQ ID NO: 1110 - DNA, 226 bp, Homo sapiens
actagaggaaaatatgggtgaatttttttttttttgcctatgattccaggattttaaaagttttagatgcccagagttgtggaggtatggagaagtggaccttctcatactgttggtgggaatacacaataatataatttgaccacgtaacaattctaggcacatgcatgctgtgactacttgctaggtgcatgaaggctcttgccaggggtggtcatggttcggt

SEQ ID NO: 1111 - DNA, 437 bp, Homo sapiens
acacatttttttttattttaggtgtatcaagaaccaataaatctgtggcaaagagttaacctatgcatggtaaaatacataaaatacatattcctttgtttcataataaataaacctgtagcataataaagaatagtgcaaactaccattgaaaaagttgtataaataaaacaactcattatacatcaggaatattttgttctaataagtttacgatacataaattatccccccaaaagttcataccttttctatttgaaagggctttgaaagtgaataatatgaaaatcaaataaacttttaaaatgtaaaattatctcatattcaagttttaaggtctttttctttataaaggagggtctgcatgtttcatattcatcacaacaatcttgaagacaacattgaaaggctttccaagtgacagcaccatgcactgt

SEQ ID NO: 1112 - DNA, 360 bp, Homo sapiens
  misc_feature 123, 212, 230, 242, 303, 314, 325, 336, 337, 349: n = A,T,C or G
actattgacccagcgatgggggcttcgacatgggctttagggagtcataagtggagtccgtaaagaggtatctttactataaaagctattgtgtaagctagtcatattaagttgttggctcangagtttgatagttcttgggcagtgagagtgagtagtagaatgtttagtgagcctagggtgttgtgagtgtaaatcagtgcgatgggtangggaagggagcctactanggtgtagaatangaagtatgtgcctgcgttcaggcgttctggctggttgcctcatcgggtgatgatagccaangtggggataantgtggttttcnaagaagatatnnaatatgattacnttctgtggctg

SEQ ID NO: 1113 - DNA, 220 bp, Homo sapiens
acatagtagaaaacctcaagagatgattgatatttggtctcagttgcagagtgctcatttaaaatgctaaaatagatacaaactcaattttgcatagaaaggtgtattttgaatagttcccatgttgtgttctcacattagagtaatttctatattaaaccatgaaaattgcctttatgagtgatgcccatttgagggcctctaaacccttcaatttggt

SEQ ID NO: 1114 - DNA, 373 bp, Homo sapiens
accgcagtttgtgctgaatgatatgtttggggtaaatcagtttttttcttatagaatttcggcgtttttgctgcaactgccactaattttgcatttaaaagaacaaaagaggaatgtatttttcaaaggagtgaatgaggttaaaatcaagattttgaatggtataaatatgcaactaattcagttgtaggatattattaaattttttattgctaaatatgtttctttcatacgttgcagtgcttacagttccaacagctttccaagaaaacatttccatatttgtgttatttgtaaagtatacataaataatgtaaaataatttgggattatttcaactttacattgtatgtctgaatttcatcgatggtgt

SEQ ID NO: 1115 - DNA, 344 bp, Homo sapiens
acaaatatgaatacattataatttgtaactgcatttaaaaattaaaatatttctctccaaatccaaaacaccacacaatctttatctgttctcatcttgttaccttagaaacatttgtcatatgctatcaggaaaatataggcaagacttactaatcagttattcatgatcaaagaaacatgattctccttaactgtgactttttgaatcatttatctgtatttctgaaatatcacacaattatacctctactctagagaaaaaaagaataaatacaaatatcaaggaggcaggaacattcatggaattaaagcaaaagtcacaagtgtttgacttagaaatgt

SEQ ID NO: 1116 - DNA, 378 bp, Homo sapiens; identical to SEQ ID NO: 348

SEQ ID NO: 1117 - DNA, 382 bp, Homo sapiens
actacatctgaggattccttggtcctttacaatagagtggctgttcaaggagatgtggttcgtgaattaaaagccaagaaagcaccaaaggaagatgtagatgcagctgtaaaacagcttttgtctttgaaagctgaatataaggagaaaactggccaggaatataaacctggaaaccctcctgctgaaataggacagaatatttcttctaattcctcagcaagtattctggaaagtaaatctctgtatgatgaagttgctgcacaaggggaggtggttcgtaagctaaaagctgaaaaatcccctaaggctaaaataaatgaagctgtagaatgcttactgtccctgaaggctcagtataaagaaaaaactgggaaggagt

SEQ ID NO: 1118 - DNA, 257 bp, Homo sapiens
actatagggtaaatacgggccctatttcaaagatttttaggggaattaattctaggacgatgggcatgaaactgtggtttgctccacagatttcagagcattgaccgtagtatacccccggtcgtgtagcggtgaaagtggtttggtttagacgtccgggaattgcatctgtttttaagcctaatgtggggacagctcatgagtgcaagacgtcttgtgatgtaattattatacgaatgggggcttcaatcgggagt

SEQ ID NO: 1119 - DNA, 474 bp, Homo sapiens
acagaaatgaggcgtcgcagaatagaggtcaatgtggagctgaggaaagctaagaaggatgaccagatgctgaagaggagaaatgtaagctcatttcctgatgatgctacttctccgctgcaggaaaaccgcaacaaccagggcactgtaaattggtctgttgatgacattgtcaaaggcataaatagcagcaatgtggaaaatcagctccaagctactcaagctgccaggaaactactttccagagaaaaacagccccccatagacaacataatccgggctggtttgattccgaaatttgtgtccttcttgggcagaactgattgtagtcccattcagtttgaatctgcttgggcactcactaacattgcttctgggacatcagaacaaaccaaggctgtggtagatggaggtgccatcccagcattcatttctctgttggcatctccccatgctcacatcagtgaacaagct

SEQ ID NO: 1120 - DNA, 423 bp, Homo sapiens
  misc_feature 288, 401: n = A,T,C or G
ttggattgccacacggctcacattgcatgcaagtttgctgagctgaaggaaaagattgatcgccgttctggtaaaaagctggaagatggccctaaattcttgaagtctggtgatgctgccattgttgatatggttcctggcaagcccatgtgtgttgagagcttctcagactatccacctttgggtcgctttgctgttcgtgatatgagacagacagttgcggtgggtgtcatcaaagcagtggacaagaaggctgctggagccggcaaggtcaccaagtctgcccanaaagctcaggaaggctaaatgaatattatccctaatacctgccaccccactcttaatcagtggtggaagaacggtctcagaactgtttgtttcaattggccatttaagtttantagtaaaagactggttaatgat

SEQ ID NO: 1121 - DNA, 413 bp, Homo sapiens
  misc_feature 312: n = A,T,C or G
ggaagctgaggcccagagagcctagggagcttgccacaggttgcactccaggttggggagtgcagatttgaggtgggtttttgtcaaagtccacccttcctggcactgagctggttaagaggctacgatggagcctggacccctcacattggagcagtgcccaccgacagaccccgcataaaaaaggaacagaacagacctaaccaagaaatcaggtgagcccaccgcgctcccctggtgccttcatgaggatggaggcaggtgaagactgaattgtggacatttccagaatgacaagagttttttttttgnttttatttttgtttttgagacagagtttcattctcttgcccaggctggagtacagtggtgtgatctcggcctcactgcaacctccacctcccagcttcaag

SEQ ID NO: 1122 - DNA, 486 bp, Homo sapiens
  misc_feature 391, 418, 438, 439, 471: n = A,T,C or G
acagacacaaacatataaatatatgtatgcacatatttgtcatacattttcaataaatgatatctttattattgtttaatgaccttttttctcttgtgaattttgacataaagtatattttataaaataagagagttgttgacttacgatgtattttgtataatacaattttgatctcttctgctctcgtttggttgatgtttgcctaaaatgtcttcttccacttgccactttcaggctgatttcactactagatctcaagtgactcttgaagagaggcaagttggatcttggtatataaaattttatataatccctctattcaatgtatgtgtattgattggcaagtctatttttaaaatatttattttctgaagacaaagattactgntattttattgtttaatgattcttgtangtctgtttctcattctatcnncctttgtgtctttttgatttttgtatggatangctgtcactactttc

SEQ ID NO: 1123 - DNA, 409 bp, Homo sapiens
acggtttaatttggtgatatcttaagcctttcttcccatccttaactgttcaagtatgtctgttgtaaccaataagtttattgctgtgaaattacttctgatggtagagaaggggttctataactgcttttgttttgttttggataaatttcctgttgtgtgggtggcatttttcttaacgagatttgcttctgtcttagcctcacacagggaaaatatccatttatcttctctctcgtgcttaattaatagctttatctttttttataccattttatccttttctctttaacagaaagtaaatatgtataaaatttgaaggaatcgaactaacaatacattctgtgtatattattttaatgaagaaaataaattgattactggcattggaacagtataaaataccagt

SEQ ID NO: 1124 - DNA, 215 bp, Homo sapiens
actacaagcccaccaagctaaagaggctgcccagaaagcagttaacagtgccaccggtgttccaactgtttaaaattgatcagggaccatgaaaagaaacttgtgcttcaccgaagaaaaatatctaaacatcgaaaaacttaaatattatggaaaaaaaacattgcaaaatataaaataaataaaaaaaggaaaggaaactttgaaccttatgt

SEQ ID NO: 1125 - DNA, 471 bp, Homo sapiens
tttttttttcacttaaaagaaagtttttattaacaaaagttttccttaattcacatttcaactttattaaatagtccaagggtttcatttatgaacacttattccagtttagttctcttaaattcatttgcttgttgtgcatttatgtttaaaaaggtaactaactgcactggaaaatgaaaatttatagttttatcaataggtcagtttttaaaaaatcaaaggataaggatttaaaaatattagggcattacacctttttcagaacaaggataatttacagaaattatacaaagcagattttcatcaaatatcaattatttagcgatgttttatttagctgaaatgttatttcacttgtaaaaactatctccggttacaaaaaaaatcagaaaccttattaaatttaacctgcttttacaaatgtcctaagaagtcttaagctaaacaaaatttaagtaggaaaacgat

SEQ ID NO: 1126 - DNA, 432 bp, Homo sapiens
  misc_feature 400: n = A,T,C or G
acccaatgaaggatccgatgaatggctggccagttactcagagtaatatgtttatgagttaaatggattgcataacggcaccacttttcctttgtcactgtggtggataaatgacaaagtagattccaatctcctgtatagaaaggtggttacccaatagcctcactggtggcttgctagcagagcctcaagttgcacctctgtggctttctgtaaattcgagtcctacagccacttcgagaacgctgcaatccccaaggcccacttggtccatgctgaagaagcggctgtgaccccaatcctgcctctcttttgctcttcagtattacttactggaggaatatgtaatattctaggtcaagtctaggagaggctcatcctaaaaaaaaattgcaaagtnttttctcaattaaaaacaaaaaagcctcaagt

SEQ ID NO: 1127 - DNA, 94 bp, Homo sapiens
  misc_feature 22: n = A,T,C or G
acacaaagaccaatgcatggtnctgtattgctaccaaaacatttactgtatatatgtttataacatgtattatgtatatatgtaatgggtgcca

SEQ ID NO: 1128 - DNA, 284 bp, Homo sapiens
acttctcatgagttatcactcagttttgcttctagagacccaccagtcaaagcagtaaaactaaatctccttaacaaaactgaagtcttcagaaaagcagtgctaaatgggtgatgaaaccttacttaaccactccctgtatgcaagatgacttattttgcattcctaaaacttctactttgattctcaatatatccgtttttttttctttttttcaaaagcattattttggtgaaaatcccaatatatgagtttaaaaaaaaatcattaacatcattaacagt

SEQ ID NO: 1129 - DNA, 470 bp, Homo sapiens
acattttaatttttataaagaaatgagcagttatctccctgacaccttattaaatgtataattaaccttatgatccctagctcacttgtgaatgcttggcagtataattggagaggaataatgtttctttttttcctctttctttgcagtcctaaaccttattctgtggttgttgaagcattagtttaatttttcccttttctttttaaacaaactttatacttgcaatgccaaggacagcattcaccaaagcttggcatagcttgcacttgttttcttttttcttgccttaaaaaataatagtcgactattaggccttcctattggtaataatacactactgtattattgtgaactttcttaattggaaatattcagtttgatccacttgtttatcagaaaccttcacttactgaataatgttttaatttttagagatgtggtgcaattgctgaacaaaccccgatttt

SEQ ID NO: 1130 - DNA, 373 bp, Homo sapiens
acctgaggggctcctgaaagacctactgccaggaccagtgaccctggtgatggaacgctcggaggagctcaacaaggacctaaacccttttacgcctcttgtaggcattcggattcctgatcatgcttttatgcaagacttggctcagatgtttgagggtccgcttgctctcactagtgccaacctcagctcccaggccagttctctgaatgtcgaggagttccaggatctctggcctcagttgtccttggttattgatgggggacaaattggggatggccagagccccgagtgtcgccttggctcaactgtggttgatttgtctgtgcccggaaagtttggcatcattcgtccaggctgtgccctggaaagt

SEQ ID NO: 1131 - DNA, 174 bp, Homo sapiens
  misc_feature 126, 130: n = A,T,C or G
actagaggctaatgcagttctcttgggaatccaggagagtaaagactcaagatcgaaagaagaacatcatgaaaaataaatgaactttgcttagtggattgactcctttgctgaagtcagttattncatncaagaatgcaattagactaattgtgaataaatgattgaatgaag

SEQ ID NO: 1132 - DNA, 476 bp, Homo sapiens
cagcgcctgcttcctcggccctgaaatcatgcccctaggtctcctgtggctgggcctagccctgttgggggctctgcatgcccaggcccaggactccacctcagacctgatcccagccccacctctgagcaaggtccctctgcagcagaacttccaggacaaccaattccaggggaagtggtatgtggtaggcctggcagggaatgcaattctcagagaagacaaagacccgcaaaagatgtatgccaccatctatgagctgaaagaagacaagagctacaatgtcacctccgtcctgtttaggaaaaagaagtgtgactactggatcaggacttttgttccaggttgccagcccggcgagttcacgctgggtaacattaagagttaccctggattaacgagttacctcgtccgagtggtgagcaccaactacaaccagcatgctatggtgttcttcaagaaagtttctcaaaaca

SEQ ID NO: 1133 - DNA, 328 bp, Homo sapiens
gccgcatcttcttttgcgtcgccagccgagccacatcgctcagacaccatggggaaggtgaaggtcggagtcaacggatttggtcgtattgggcgcctggtcaccagggctgcttttaactctggtaaagtggatattgttgccatcaatgaccccttcattgacctcaactacatggtttacatgttccaatatgattccacccatggcaaattccatggcaccgtcaaggctgagaacgggaagcttgtcatcaatggaaatcccatcaccatcttccaggagcgagatccctccaaaatcaagtggggcgatgctggcgctgagt

SEQ ID NO: 1134 - DNA, 416 bp, Homo sapiens
actgaattcagtgcttagaactgaagttattgagaggacagctttaaaagatgaatgaactcaaaagttcgagttgtgctcttcacgttggttcgataatggcctttatttgaaagctttttaatttttctttacagtaaatattccattctgatttcataaattaaacatttatgcctcccttttgtgttgacactgtagctcatactggaaaagtcgatcaatgttttgcagtttattgaaagtagttctatatataacaatgttataagcatttctttagaaatggttgaaaatgcttctaaaatgtgattatcgaccatggtatgcatgatcgttgtaattgttgacattccttttagaagttgtgaaatgttacaacttgtgcttatgtagacacaatcttctgtctcagt

SEQ ID NO: 1135 - DNA, 254 bp, Homo sapiens
acagaaaagccactatttatacattgttactaagacaaggaagattcagttcaactcaacttgctcttagaataagggtaaaaagtaaattaacaagtaagtgaagtatgatgttgttgccactgacattacaggtggaaatataagggaaatttaaaccagaaaaatgacacaataactttaaagaggagctgaaactttgtcaaaaaaagaaaaaaactattagcctgttttcaaagaaaaacattctaaaa

SEQ ID NO: 1136 - DNA, 463 bp, Homo sapiens
acacaatggtttattaaaggaatgtatggcccacatcaacctagcaaggattctactggtaaaccttcccatggccaaaggaaaaacaagcaggagttgagtggctggggtggggtgcaggcaatggagagagggccgaagggtgtagaagctgaagggggctagaagcttactcctgagtttcttccttctgtcttcaaatctttacttcttatggccaaagacccagctgtttcataggctggagatgcactcttctagactgctcgagacagccagagacaggggaggagggaagaaggatactgtggaaagggatggcggggcaaacatttagagctagaagccactactgggccaatgctaaagtttctgtctctaagcctaaaaaagccagtgtagtagggcccttatcactcttagtttgctaggcttcccctctgaaataatgagcagatttagc

SEQ ID NO: 1137 - DNA, 357 bp, Homo sapiens
accggcactgaacaagcatttacttaacatccaatccaggctgcatatgcacaaaatgatctgaccacatgcttatgcaaaataaagtttttcttagaaagccaaaattccaaccattctgactgtccgctgcctattcccctgttgagtattttgagcgaacttctatagaatataagaacaattggcatggcacttaaagactgcaaaaaacagaacacaattaaaaacatttataatgcatttctgtataaaatacacaccgtaaatcttattagttaaaaaaagatttaaaaacaaaagaccaccctgaataatggttaaaacctcatcatagaaaaatgctcatcattttgt

SEQ ID NO: 1138 - DNA, 207 bp, Homo sapiens
gccggacggcgcgcgtgcgtgctggcgtgcgttcattttcagcctggtgtggggcttgtaaacatataacataaaaatggcttccaaaagagctctggtcatcctggctaaaggagcagaggaaatggagacggtcatccctgtagatgtcatgaggcgagctgggattaaggtcaccgttgcaggcctggctggaaaagacccagt

SEQ ID NO: 1139 - DNA, 605 bp, Homo sapiens
  misc_feature 600: n = A,T,C or G
accacaaacacactcaacttgtctatgaattagagaacaagatactgctgctgcttctttttgtcttttgaaatatacaatgttttgtaggctctgcccttcaatgtgaaagcaggacattaaatttgaaattatttgacaattaaatgtttaggaccatctaacttcaactgcaaaactaaacagatctaccttgtccttccttcaaaccacctcacaaaaataagagaaaacaattcaaacatgattatttttttaaagtccttgaaagtattaaaactctcagagaaaaggaaaggaagaaagaaaaacaagaacaaggagggagaaaagctttaaaagaaaagtgttggggtgggggaggaatcaatgggcctctcttttatttggcgacaagcaagtgcaagaaagttcatttgtaatttgttcagttgtctgtcttttgcacatctgcattctgaccagaaggaactttgaggtttttctgcagcacatgagcatctgcgggctctatcctcttatagtagttcttctttgtctcaataatctcaaagccaaacttcctgtagaagtcaattgccgactcattgctgatctganatgca

SEQ ID NO: 1140 - DNA, 254 bp, Homo sapiens
acattacttccagtaaatatttgaaaatatattgaagtaaacttgatttttttttttgtcacaagaaaatattaagagttattgttgcagttctgatgagctgcaggttttttgaactcacttctggaggtgcagagccacaaacgcactttcggggcctagttttgctcgaatatgaatttagataggtatcaagctgtaactaagacaatatttgataaatgttggatgacatttaatttaatggagcatgt

SEQ ID NO: 1141 - DNA, 298 bp, Homo sapiens
acttcccatagtgagttacccttagtaaatactcagtaagttgaattgaatttaaattacctgtaagtcttaaaatgtgggattaaattaagaatatattgtcctggaaatacccaaatgtctattgatggatgaatggataaacaaaatgtggtatacacataatggaatattattcagccttaaaaaggaatgaaattctgacatgtgctacaatatgatgaacctggaagacattatatgtgaaataagccagacagaaaaggacaaatactatatgattccacttatatgaagt

SEQ ID NO: 1142 - DNA, 125 bp, Homo sapiens
actgctttcaacttaaatcactgaggcatttttactactattctgttaaaatcaggattttagtgcttgccaccaccagatgagaagttaagcagcctttctgtggagagtgagaataattgtgt

SEQ ID NO: 1143 - DNA, 272 bp, Homo sapiens
acccactgaggttcagtatcaagtttgttaattaacctaagcaattcctgataggctttatcaagatcggaattcacaattgccgtatcaaagtagtggccattgttctgctccatctctcttgtcttctcaatgatttctctcaactcttcaggctttggattcttgccttctttggccaataatgcccgaagtctttcttgtgaagggggtgcaatgaagataatatatggtttcaaatctgaattccggagagtcttcaatgactgtgt

SEQ ID NO: 1144 - DNA, 523 bp, Homo sapiens
acaagctgaaggtggggtgtctaacaactaaaaactatcactaaatctcaaagagaaagttcttgcaaaatatgtaaagttcacaaggtgcagacattttccttctttaggcttttatctaaggaagggctatgaaactgggcccatctgtatacaggctcaaatttacgtttttaaaggaagaatctatgcagctgaggcttattgcaggaaatacttcatttgtatgtaaatattattgtaaataaataggaggctgtatatttttgaagttgttgatccgcactgaaatagaagtctctaggatctgcatataaacaataaatgtttcctagaaattagtggttttgtttgggaattagaaaaatttacattctctcccaggtaacatagttctctcaatgtaaacttggaacctgaaaccctacttaatttagagaaagaaatgtctgagaaatagttcccttgatttcttatgctggcattaagatcaattatttaacagatagtcctctgagataca

SEQ ID NO: 1145 - DNA, 474 bp, Homo sapiens
acttatttcaacaattcttagagatgctagctagtgttgaagctaaaaatagctttatttatgctgaattgtgatttttttatgccaaaatttttttagttctaatcattgatgatagcttggaaataaataattatgccatggcatttgacagttcattattcctataagaattaaattgagtttagagagaatggtggtgttgagctgattattaacagttactgaaatcaaatatttatttgttacattattccatttgtattttaggtttccttttacattctttttatatgcattctgacattacatattttttaagactatggaaataatttaaagatttaagctctggtggatgattatctgctaagtaagtctgaaaatgtaatattttgataatactgtaatatacctgtcacacaaatgcttttctaatgttttaaccttgagtattgcagtttgctgctttgt

SEQ ID NO: 1146 - DNA, 329 bp, Homo sapiens
acaacaccaacaatatcctggaccttgaaattctgtttacttcagtccattgtatcctttaaggcacctgtgctagcctagattttgtaataacactgatttatgagaatggacaaaagtggtagggaaattgttccctctccacttctgaaagtatgatgatgtattaaggatggaggagttattaaaaatgtctcttctgatgaggtaacaattagatgaaaccatgttaaagctgagatgaacacttagaaattcagggatattgggtctttagccttatgaatttgagctgcttatttaattggtgtaatttactacatattagt

SEQ ID NO: 1147 - DNA, 191 bp, Homo sapiens
acttaccattttatctttactttaaaaacaatgccttttccaaaatataaaaaaaagacctatttttaaagaactatttaaagatggctttgaaaacaacacttttatttacaacaaatagatggtagtgcaacagcactcgtggatgtttacgataaataaaaatactagtattccggcatcctttgggt

SEQ ID NO: 1148 - DNA, 117 bp, Homo sapiens
acgaggacattttgccccgcggcttgttggggtctcctttacccatgttgacagatccgcgtccacctggtgcgagcttttcctcagagtcccgcagagcggccggacccaacggag

SEQ ID NO: 1149 - DNA, 363 bp, Homo sapiens
  misc_feature 239, 240: n = A,T,C or G
acgtgccaagcatcctcgtgcgaccgcgagagcccggggagcgggggcttgccggccgtcgcactcatttacccggggacagggagaggctcttctgcgtgtagtggttgtgcagagcctcatgcatcacggagcatgagaagacgttcccctgctgccacctgctcttgtccacggtgagcttgctatagaggaagaaggagccgtcggagtccagcacgggaggcgtggtcttgtanntgttctccggctgcccattgctctcccactccacggcgatgtcgctgggatagaagcctttgaccaggcaggtcaggctgacctggttcttggtcatctcctcccgggatgggggcagggtgt

SEQ ID NO: 1150 - DNA, 353 bp, Homo sapiens
cggctgttggtttctgctgggtgtaggtccttggctggtcgggcctccggtgttctgcttctccccgctgagctgctgcctggtgaagaggaagccatggcgctccgagtcaccaggaactcgaaaattaatgctgaaaataaggcgaagatcaacatggcaggcgcaaagcgcgttcctacggcccctgctgcaacctccaagcccggactgaggccaagaacagctcttggggacattggtaacaaagtcagtgaacaactgcaggccaaaatgcctatgaagaaggaagcaaaaccttcagctactggaaaagtcattgataaaaaactaccaaaacctcttgaaaaggt

SEQ ID NO: 1151 - DNA, 301 bp, Homo sapiens
ccgaaaggaaagaaggccaagggaaagaaggtggctccggccccagctgtcgtgaagaagcaggaggctaagaaagtggtgaatcccctgtttgagaaaaggcctaagaattttggcattggacaggacatccagcccaaaagagacctcacccgctttgtgaaatggccccgctatatcaggttgcagcggcagagagccatcctctataagcggctgaaagtgcctcctgcgattaaccagttcacccaggccctggaccgccaaacagctactcagctgcttaagctggcccacaagt

SEQ ID NO: 1152 - DNA, 244 bp, Homo sapiens
actgcaatcacaatgccagatggtgtttatgggctatttgtgtaagtaagtggtaagatgctatgaagtaagtgtgtttgttttcatcttatgaaaactcttgatgcatgtgcttttgtatggaataaattttggtgcaatatgatgtcattcaactttgcattgaattgaattttggttgtatttatatgtattatacctgtcacgcttctagttgcttcaaccattttataaccatttttgt

SEQ ID NO: 1153 - DNA, 504 bp, Homo sapiens
caggtacaaaatgaaatagacagacttaatgaacaagccagtgaggagattttgaaagtagaacagaaatataacaaactccgccaaccattttttcagaagaggtcagaattgatcgccaaaatcccaaatttttgggtaacaacatttgtcaaccatccacaagtgtctgcactgcttggggaggaagatgaagaggcactgcattatttgaccagagttgaagtgacagaatttgaagatattaaatcaggttacagaatagatttttattttgatgaaaatccttactttgaaaataaagttctctccaaagaatttcatctgaatgagagtggtgatccatcttcgaagtccaccgaaatcaaatggaaatctggaaaggatttgacgaaacgttcgagtcaaacgcagaataaagccagcaggaagaggcagcatgaggaaccagagagcttctttacctggtttactgaccattctgatgcaggtgctgatgagtta

SEQ ID NO: 1154 - DNA, 496 bp, Homo sapiens
actcatttacaataaaataaccaagtgaagttacaaaaggcatatattactgtgaaaagaacatacactccacattttgccgattaataatggcaatcataatttaacataataaaagaatatatatctattgcttttcatcatacttgataaatacagtatgaacaaaattttcattgtatacttttcacaagataataaataagttaaatagttttcatattgagttgtggtgcagtggtgcgaatcaactcaaagcagctaaaaattcagcagttattctccaacaattacaaagtaagctctgcgcaaggcttccagagggagcagacaaaatggttctaaactgaacatccactaagtggtggcaatgaaaccaagtaaccagtatggacctttggaatgcaagggttttttcacccccagacatatataattctgttaaaaaacaaaaaacacctatgggctgagggctaactatcaaggcatattcttg

SEQ ID NO: 1155 - DNA, 482 bp, Homo sapiens
accatccctgggcgctgcttcatcacatgtcgtctctctctttctgcagcacaacaagattcgcagcgtggaggggagccagctgaaggcctacctttccttagaagtgttagatctgagtttgaacaacatcacggaagtgcggaacacctgctttccacacggaccgcctataaaggagctcaacctggcaggcaatcggattggcaccctggagttgggagcatttgatggtctgtcacggtcgctgctaactcttcgcctgagcaaaaacaggatcacccagcttcctgtaagagcattcaagctacccaggctgacacaactggacctcaatcggaacaggattcggctgatagagggcctcaccttccaggggctcaacagcttggaggtgctgaagcttcagcgaaacaacatcagcaaactgacagatgaggccttctggggactgtccaagatgcatgtgctgcacctggagt

SEQ ID NO: 1156 - DNA, 237 bp, Homo sapiens
acaaggacccctgctttgccagtgcttggggtggtttccggggagcaggagtttcaattttcatgatttcatcacagcactgcttccattggccttgttgacagcaatagtaagcagcggctcttccccagtgtctgcatcctcaggttgccggtaacagaagaggtttgtgcctttcagaactccatgcacttgtgcccagttctgcatctccccagcttgctgcaccctgagggt

SEQ ID NO: 1157 - DNA, 534 bp, Homo sapiens
acagctactatccagcccagtcaacaagcccagattgtcactcggtcagtgctgcttctatgcaactgcctccaccccgactacagccccctccattacaacagatgccacagcccccgactcagcagcaagttaccattctgcagcagcctcctccactccaggccatgcaacagcctccacctcagaaagttcgaatcaatttacagcaacagcctcctcctctgcagatcaagagtgtgcctctacccactttgaaaatgcagactaccttagtcccaccaactgtggaaagtagtcctgagcggcctatgaacaacagccctgaggcccatacagtggaggcaccttctcctgagactatctgtgagatgatcacagatgtagttcctgaggttgagtctccttctcagatggatgttgaattggtgagtgggtctcctgtggcactctcaccccagcctcgatgtgtgaggtctggttgtgagaaccctcccattgtgagtaaggactgggacaatgaatactgcagca

SEQ ID NO: 1158 - DNA, 342 bp, Homo sapiens
acatcctctctcctctacagagcctcaatgtttaatacatacatgtgactttagtcataaaaccacatagtccaggaaaaaaggagccctttagaaaaaaaaaatcagtttagaatgactttcaaattgaccattccttttcaaatacttaaattcaaataacagatacattcagaggcccaaatgttggcatagaataaaatcatgttcatttattttttttctgcatcttagaattagaaggcataaaattaaatatgttgaatgtaataaattcatccatacaagtgcaagtctccagatataatgcattttatggcagatttattattttaaaaatgt

SEQ ID NO: 1159 - DNA, 367 bp, Homo sapiens
  misc_feature 341, 344, 353, 359: n = A,T,C or G
acacttttttggggatatgcttagtaatgctacgtgtgatttttctggaggttgataactttgcttgcagtagattttctttaaaagaatgggcagttacatgcatacttcaaaagtattttcctgtaaaaaaaaaagttatataggttttgtttgctatcttaattttggttgtattctttgatgttaacacattttgtataattgtatcgtatagctgtattgaatcatgtagtatcaaatattagatgtgatttaatagtgttaatcaatttaaacccattttagtcactttttttttccaaaaaaatactgccaagatgctgatgttcagtgtaaanttntttgcctgntcagtnacagaaag

SEQ ID NO: 1160 - DNA, 338 bp, Homo sapiens
  misc_feature 53, 138, 146, 152, 224, 234, 253, 306: n = A,T,C or G
acaagctttttttttttttttttttttttttttttttttaggaactaaaaaanaactttatttattgagggcaaggggatgcaaacaatacaaaaatcaaaagcttatctggtatttaacttttctttctctgcttgncaaatganagttanattttatttttacatttgctaagtgtcctgatctgctcatgaaatccttctatgggggaagctgtggggcanattccttaancgaccctttgggacaactnttatcagggaggagcgaactgctcatttctgcctacttcttttccctaattgngggcctcaccattgcatgcaatgactattttg

SEQ ID NO: 1161 - DNA, 316 bp, Homo sapiens
gaagcagtgctgctacagaccccagcccaggcaggggaagagcccctgggtgtgggcagtgtggctgctggaggacgctatgatgggctagtgggcatgttcgaccccaaagggcgcaaggtgccatgtgtggggctcagcattggggtggagcggattttctccatcgtggaacagagactagaggctttggaggagaagatacggaccacggagacacaggtgcttgtggcatctgcacagaagaagctgctagaggaaagactaaagcttgtctcagaactgtgggatgctgggatcaaggctgagctgctgt

SEQ ID NO: 1162 - DNA, 320 bp, Homo sapiens
acacatacagtggtaagtgtggtgcttgcctcaggtaggcagtcagatgaataactggatggtctccaaatacaccaagagctcaccctcttgcagtgctgtctgcctggaatgttcttttcctctttcactgccagattcctacttttccttcagggactaccttctctaggaagtccttaactcctgatctcccaccatggaggtctgtttcctgggatcccactgtccctgcacatccccatcacagcccagagaagccttaggcctgactcatctctgcccccagcatcacccagtatgggagaagggaggcttta

SEQ ID NO: 1163 - DNA, 246 bp, Homo sapiens
actacatgatgaaattcttaataaacctatggaaacacttaaacttgctattccatcagggatctatactcttcagaataatttactgtatgtggcactatcaaatctagatgcagctacttatcaggtcacgtatcagttaaaaattcttacaacagcattattttctgtgtctatgcttagtaaaaaattgggtgtataccagtggctgtccctagtaattttgatgacaggagttgcttttgt

SEQ ID NO: 1164 - DNA, 330 bp, Homo sapiens
acaaggggtccagaacttgcagaatttgcaaatacagaatactgctgcccaacaaataactttgacgcctgttcaaaccctcacacttggtcaagttgcggcaggtggagccttcacttcaactccagttagtctaagcactggtcagttgccaaatctacaaacagttacagtgaactctatagattctgttggtatacagctacatccaggagagaatgctgacagtcctgcagatattaggatcaaggaagaagaacctgatcctgaagagtggcagctcagtggtgattctaccttgaataccaatgacctaacacacttaagagt

SEQ ID NO: 1165 - DNA, 66 bp, Homo sapiens
acctctccaggagcctttgccttaatgtatctctgcctggacaacttgtggtggggggtgggggga

SEQ ID NO: 1166 - DNA, 474 bp, Homo sapiens
acaagtcataaacacagtgtgcagcagtgatgatccacaggggcgtgatgacagagcccccgcacaggtggtagccctggaactgaaggctggcctgccagggccactgcgagagcaaggacatgtttccacccacgatgcgtgagctgtagccccttctatgaccacaggctgtgcactgcaaggtaaccacgtggccagaggcacatccctccctcacatatactgagtggtgtaatgcagtcaccttgtcatctggcaagaggtgatcgatggacacaaactcctcccggaactgcccctccagcgagctcactctgaggttatctgaactcacatagcttgggaaacccagttgggcacaggcaacatttgcgtagtgacccttccagtcatcggagcacatggtcttccacgaagcagctgtgaacacctggagcacggcattctgaccacccacccggacacagcggt

SEQ ID NO: 1167 - DNA, 275 bp, Homo sapiens
acagggtattaaacaaataccaaggggaacagttaacttcaatacaaggtcaaaatcagcaacaagttctacaatccagtgctgatatcagatacaagcttcaaggacaatttcttttcgaaggcttattccagtttcgtgaggctagcatgaggtgtgtgcatttgccaggggcaaatttctattctcaattaacccatgcaacaaatgctacgcatctgctgagtccgtttagaagcatttgcggtggacgatggaggggcccgactcgtcgt

SEQ ID NO: 1168 - DNA, 257 bp, Homo sapiens; identical to SEQ ID NO: 1118

SEQ ID NO: 1169 - DNA, 239 bp, Homo sapiens
  misc_feature 223: n = A,T,C or G
tttttttttttttttaacttaaatgcttttattgacaatgtcttggaacaataagcaaacaatgcttaaatttttcattcaaattcactttccacatgtcaaaagacctcaaggtagaaaaaaataaaataaaaatataaatatctgagaatccatcttaataaataaattaaaaacacaataaaacgttttcatggaaaactgttaatgtcagaacattcanaccacctcaacaatgc

SEQ ID NO: 1170 - DNA, 334 bp, Homo sapiens
acacagttagtgggagcacactatataaatcctttgcatgacaccattcaacaatattttttaaaatctacaaaattttaaagtttcacttccctagcaaaatatcttcagtcaagaaattagtctttgaaaattatgaaaattgttgtgggaaatatttatacaaattattactgataatgcacatatattttgaaacattgtttctagaagcaataaaatataacctatttaggagataacccaaatgatttgtaaaaaaattaacttgtagaaaagggaaggatgttgtgtaaaatcaagtcaattatttgaggtttttataatattgagt

SEQ ID NO: 1171 - DNA, 278 bp, Homo sapiens
acctgggattacaggtgcgtgccaccgtgcccggctcatttttgtattcttagtagagacggcatttcaccatgttggccaggctggtctcaaacccctggcctcaactgatccactctcattggccttccaaggtgctgggattacaggcgcgagccaccacaaccggctcagtaaatacattttttattatcaaaaaagagtagtgtatggttggcgtattctgtgtagaatgtattttattgatgtctcctatttttataatttctgagttaagt

SEQ ID NO: 1172 - DNA, 479 bp, Homo sapiens
actgaaaaactgtaatttttcagctgaaaattttttaatctaactttgctagttatttttatattgcaatctatattaccaatttaggaagtgatttctgagtctcttacactgtaaaggtgcactttattttctttgtcttccccatcatgtatttattgtgtcttgataactgatattaatctaaattcaatgtgtttttatgtaaaaatttgtcagttgtttagaatatttcactttgtttttgaaacggagtgacaaggcagatttttggttagaggacgggagttgatcactatcattactttttctagtttacctgttttttatatttaaggctgctaagccatgttcagcattttaaatgtggtctatcctgacatacagtgtataacaacataactcctcggaacctcctatgtgtggtataattctactcttccaaggaacatgacttcaatactttcagtgattcaggt

SEQ ID NO: 1173 - DNA, 564 bp, Homo sapiens
acaagtcatgatggtcatcaacagctaagtgaagttagtagcaaaagagagtgccctgcttccggccaaagtgaaccacgtaatggaggaaccaatgaggaaagcaactcatcggggaatacaaacacagacccaccagctgagggtaagattaaccaagatttattctgccatgtaatggttagcaaaatgaattcatttagcaaaataactactatctaagtttccaagaggaggaacagtcacacttgggacatattacaactttcagttctggttaatttataaatacatacatttaaaaagaggtagagagcgctgatcgtgaatgcatataatctgataaaaagtaattccttgcgatattttataaagaaaacgaagagaaagaaataataaaagtaaattaatatttacctcaaaatccttatgtgcagttatcctaccaaattgaagtggcaatcccatacttctcatgagttcagcctcagaatcaagttcattttcatccaggcctatgcctttgctgccatgtgattctgcagtacctcgccgcgacccgct

SEQ ID NO: 1174 - DNA, 468 bp, Homo sapiens
acatcaaagattacatgaaatcaatcaaagggaaacttgaagaacagagaccagaaagagtaaaaccttttatgacaggggctgcagaacaaatcaagcacatccttgctaatttcaaaaactaccagttctttattggtgaaaacatgaatccagatggcatggttgctctattggactaccgtgaggatggtgtgaccccatatatgattttctttaaggatggtttagaaatggaaaaatgttaacaaatgtggcaattattttggatctatcacctgtcatcataactggcttctgcttgtcatccacacaacaccaggacttaagacaaatgggactgatgtcatcttgagctcttcatttattttgactgtgatttatttggagtggaggcattgtttttaagaaaaacatgtcatgtaggttgtctaaaaataaaatgcatttaaactcaaaaaaaaaaaa

SEQ ID NO: 1175 - DNA, 358 bp, Homo sapiens
acttttaaaaatatgcaaaatcacaaatgggactgctaaattataatgcatattttagaatgagaaacatatcttttcttcctttaaagtgccatatagagaatgacatcttataacccagagccactttgtttaaaatccaatgtgaaaagactgttatggaatgaaaagtttgcacaactccttggagcagttaaagtccgctacatgcaacataggctacaaagcactcaagacttggtagcttttctgaaatttgagtccccctcccatatttaatggaaagtaacatttacagggtgcatttacatacactataatacaggaatgatgtccctttgccagaagataaaattgt

SEQ ID NO: 1176 - DNA, 391 bp, Homo sapiens
acagctgtgtagtaaagatgccttctggtgaatttgcacgtatatgccgagatctcagccatattggagatgctgttgtaatttcctgtgcaaaagacggagtgaaattttctgcaagtggagaacttggaaatggaaacattaaattgtcacagacaagtaatgtcgataaagaggaggaagctgtaagtagtttttaagtaaaaagaaaatagtttgaagagaattataatactgcttattaggttaattgctaaaattaaaagtagacagaattggatcccaagtaatttctgaaaattgagatactgttgaaatctgcgaatgatttataagtgtcatccaatttagaattatatttgcaagaagggaatacaaattcagcacgtgt

SEQ ID NO: 1177 - DNA, 237 bp, Homo sapiens
acagtttacagttgaagagcaaacagaaaggttttctcttggtgggatatgcagaacttgggatgtgtgtatatataaatatataatatatataaatatatataatactgacttaaaaaatcaaatcccccgacatacgttttttttaatctgtgccaaaaatgtgttttcagaggaaatcttattttcatattcagactttgtattgcccactcatttgtataagtgcgcttcggt

SEQ ID NO: 1178 - DNA, 564 bp, Homo sapiens
  misc_feature 534: n = A,T,C or G
actatttctaagtaaccttctagaaaggttacaatagatgcatgctcaccagaactgtatgataatacctcattgtttcaccttaactatcaggtgatagtatattcagtcttcattattaaagcttagaggtggaacataatttatatctttttcatatccattttatatctaattaaatatgtgagttcatcacagctttgcagaagaccagatattccatttcaaaaaaagagtttggaagttggcttccactgttatggaaataattcaacttatcacccaaattttagtttattaatttccagtgctaatgtttactttggatatataatgtcaaattttgtttttctgtaagatttttaaaaagcataaaacagttactcttaattttggatggagtcatttccagtcccttctgaaataaggcagattatgaataagtaaatggaaactattgggccaattttaggatttctctgtaactaccctgcttgataaatttttatatccacttataggtcaagaatgtangtatcttttttctttctcagccatttatat

SEQ ID NO: 1179 - DNA, 421 bp, Homo sapiens
acagaagaagtaggaaaatcctacccataccacagctcactaatggagtcataatacggagtcaccgatatctcagtttacagctttacaaataacccatggagaaacaaatactaaacttacttttttgatattaatgtgtgaaaatcttaactaaaacttcagacaatctcaatattctttgaagtatcttcccagtattagatattgaggaggcaggaatgagaaatactgctttgatgctttatctttttaccatattagtcatgatttaaattgatttttaacactaatcaccatttaaaaaattaaaaccacctacataaatatgggcaaatccaactacagcagaaacatttcttagcaaatatgattaaacattccaataaatttcatgagacatgactcacaaaaacaaagt

SEQ ID NO: 1180 - DNA, 385 bp, Homo sapiens
acagtttaattattaaactgcaatctagctggatttttttagtatattcagaataactaatatggcagtgggtttgctattgatttagcacactgttcaaaaaacatattgaacaattataactttaagactccacccagtaataggtctaaagcccatagatgggaatcaagtaaaatttttaatttttaaagacacaggactaagctttattctttcttcttctatttttattaataacatattatcttgtttaaccagagttcaacctctgagctattgaataggctcttttataaaaaatagtatggggaagatgtatggaaatttccatttaatagcacaggttcaagataatccagctcactaagaaataaacataagt

SEQ ID NO: 1181 - DNA, 470 bp, Homo sapiens
actctatgcattctatctatacagaaacacctatttattattacagttgatttatgcaggattaacatttttggtgttaaaattgttaaacatcatgcttactgcacatcaactctccataatgaatctgaacttcacaatgatttaccaaacactttacttaaattactaattaaataaatgaaaaatgcaccgagccaaacaaaacttaactgggctataaagaaaaaaacccttcaaaacagtccatatacacatctatttcaaaactacctttgctagctagcccctttcccaaagttttagcctgaaaaaacagtaaaatctacacaaaattttattgcaatcatacaagggttacattaggtcaacaaatactatgatgcaattttatatttattaaactacagttcaaagcacaaatttacacattctaaatacactaaacattatctaatgaagtcacactg

SEQ ID NO: 1182 - DNA, 406 bp, Homo sapiens
acagcaattgtagtaactgacacatcctctctttgcaagctgctgactgggcacactcatgccaagtttcagaattattggtcttctgggtttttgctttttaaaagaggtgtgggagcagaggaatggaaacaatcgtgagtttttgagctagggaaagttggagctcctttaatctttttaaaggatcagtgctgccctaagtgaataaactcaattgtccatctttattttagagttttaatgaattcaaggaagggagcatagcatatctgtggcaaactattttccactcaaatcctgagttattgctgcatgctttaatttcttccctttcagcatctgagaaccttaaagccaatgtctgcgatctttttttggatatttatacttttagatatatagt

SEQ ID NO: 1183 - DNA, 537 bp, Homo sapiens
acccatgctcacacacacacacttccagttttatacaaatttttttaaaggaaagaaaccaacccaaagtattgcatttgaggtgacactccctgaagaattttatacagaggtaatatactgtttagcacagctgaaggtttttttattctttctttttttaaagtgagcccatgatttggtgtctttcccagattatcccctttgcgacaacacaagcaaaaatatttacaaaggtaaggcatagtcaaactacataaagagaaaaaatcatgaggaaaatacatgaaaaagactaaagacttcgccataacaaggtcttagtgataatagtgtccgtaaagatgtcatcagaattggtaaagtcaagcatgctgcaaatataccctttggattagaaaagagcacaattttctttttttgttttgttctgttttaagaagtggcatactgctctttctccctttggataatttcttttaagcccatcaaaggaaaaaacaaacacaattcaaacaaacactgtcaagtgattca

SEQ ID NO: 1184 - DNA, 161 bp, Homo sapiens
actaaagggcaaggttcaccactacaaaaaggaagttgtctaaaagcaagaattcaattaacgctgggtaagaaaagtcaaaacactaatgagttgtccatgaagccaactgctaagaacgcgctcaactatacgcgacatgaagacactacgcacgaagc

SEQ ID NO: 1185 - DNA, 351 bp, Homo sapiens
  misc_feature 179, 180: n = A,T,C or G
accaaatttaacttggcaaactttctattgcctgtcccatgtgcatcttatttaaaatttcccccatggaaatcactctcctgttgactatttccagagctctaggtgtttaggcagcgtgtggtgtctgagaggccatagcgccatcatgggctgatttttattaccaggtcccccannagcaggtgggaggctctgcttcctgctgccgctctgcagcctggacctgtggaccctggttgtaaagagtaaattgtatcttaggaaaccagtgtcaccttttttttcaccttttaattttatattatttgcgtcatacatttcctgtaacggaagtgttaattttactgt

SEQ ID NO: 1186 - DNA, 373 bp, Homo sapiens
acacataaagtgcacacattacctatgctgaacaatgccaagaaacataatatattgatgcaacagttttctaaaataaacataaaaatgagcccagaccatcagacaaaagcaaaacacttatttccaaatagcacaatgctgaaaattgatagcaatcctaaaacacctccaactttccttaaaagctgccaaagtccaactattttttaaaaattgattttttttacattaataaaaatctggtgacaaacattataaaaccaaatgctggacagtctttactcctttaaaattccaaatattccaacataatcacaggagtaaaaaccattttaaagtgatatgctttatgaaacaaacaacaatatgt

SEQ ID NO: 1187 - DNA, 527 bp, Homo sapiens
acttttttgtttacttgtgaaaatggccatctttaagcatatttattttctgccactttatttaaaggcaagcaatattttcttgatcataaatattttgtaatgaaatacttcctcttttccagggctttgtatgcacttgtataattacattgatggcaatgtagagtttgaatttcagtctgtaaatacttttttggaaaatagaaatttttattgctttaaagttttggatatgggtggttttcttttccgggtttggtggaaagtaatttgagaactttaaggttgtctttttaactgctggcaaaatgttgattttttaatattagataaaacgagtaaacgaaattccccagaaattagtagtaagtagggtctttgtgggttgggaagtagttttaatgtagaaagacatttacatataagtctgtttaatttcaaaggagtttgtgaaaaaaaatccatggtgaaaatgaaacaatgacatggttaatctggaacttacgttcttataccaataaaaa

SEQ ID NO: 1188 - DNA, 293 bp, Homo sapiens
caaaagttatataaaagattagtttttactataaacccttgtcttttactcagatcctagcatcccttttcacatggtttctccatgtatataacagaatcaagaaacaaattttaattaaacaatctgtaacagaatcaagaaacaaatacattttaattaaacaatctatatggaacaaacattcccaaattctaagaataaatttttctttaagttttctctgagtttggcaattgttgttttttataatttaatctgtttaaatcatcaggtcttataaaatataatgt

SEQ ID NO: 1189 - DNA, 596 bp, Homo sapiens
  misc_feature 477, 513, 550, 553, 556, 570: n = A,T,C or G
acttagaaccagaatagcatactgtataatttagtggacttagttatttcaaaagatattattccacttccctgctaaatgaaattaatcatcacctttgactttcaagaggtgaaaatagcgtgtaataaagcatatcttttagtcatcaggcctactgtgaaaagcaaatacagactgtatatattatatactagctgttattttttgcttcaattgtattttatctcttttgttaaaaaaacatgatttcatcttgtaactgaactgcacatataatatcagagaaaatcttctaatggcatgacttgtaaaatctctaccccaacaaattagtttgatatctaggagttaccttatctgaaacataatgagttatgttctacagcgtctgcaatcaaactttaaacaatcaggtccctctttcagttagtatgttgttatactgaatacatgagtgttatggaaaagatttangtctcataaatgggtgaagaaattgtcaatctacanaaactaattcattccattaggatttcttgggtagcancanggntccaaattctgatnggcctttagtgatggaaaaataacaa

SEQ ID NO: 1190 - DNA, 122 bp, Homo sapiens
acgcttgtgctttcatgattctctccatgttgccagaccatccgtgtacaagctttttttttttttttttttttttttttttcttttctttttttttttttttttttttttttttttttttt

SEQ ID NO: 1191 - DNA, 204 bp, Homo sapiens
actgttttcattgttatttaattttgtgttttttaacttctttcatgatttccttttaactgaaggttttcttagatatttagtttgctggtatattcttttaaaattgtatcattgctttctttctatattggattattgtcagagaacatgatttgcatgatattaactttttggagtatattgttgcatctttgtggccta

SEQ ID NO: 1192 - DNA, 391 bp, Homo sapiens
acaaagaaacagacctgctaatacttttcaaggacgattactttgccaaaaaaaatgaagaaagaaaacaaaataaagtggaagctaaattaagagctaaacaggagcaagaagcaaaacaaaagttagaagaagatgctgaaatgaaatctctagaagaaaagattggatgcttgctgaaattttcgggtgatttagatgatcagacctgtagagaagatttacacatacttttctcaaatcatggtgaaataaaatggatagacttcgtcagaggagcaaaagaggggataattctatttaaagaaaaagccaaggaagcattgggtaaagccaaagatgcaaataatggtaacctacaattaaggaacaaagaagtgacttgggaagt

SEQ ID NO: 1193 - DNA, 489 bp, Homo sapiens
accaagtctaccattaaaccaagccagatgtcagtagccaggattacctgtgttcggggccagggacccaatgagggtatccccttcattgatgactacatctctacccaggagcaggtggtggattacttgactcaatactcgggtataaagcctggtgacctcgatgccaaaatttcctccaagcacctaacaactctcaagtctacctacttaaagcttcgttttctcattgacattggagtcaagtttgtgggtcatggcctgcagaaggacttccgggtcatcaacctgatggtttggcagggctcttttaagagtcttcttgtgagagtgggcccctcagggtatacattgtgcctttagagaatggggaattataggtcccctaccttaagtctccccttcttttatccttgccaggtgcccaaggaccaagtccttgacactgtctacctgttccatatgccccgaaaacgaatgatttcc

SEQ ID NO: 1194 - DNA, 255 bp, Homo sapiens
acagaaaagctataaagataaatgtgacacattctttaccattaataataatatatattatctaaaatttaatttgagctaatatataactgacaatgaaatatttggaccacctaaaacaaggataaattattctgtgacaagtttatattcttgcattatgcaaaaatgattctaaaataaactattttttttcccagaaattgtatgagctatacattgctatgtaacaaattgccccaaatttagcggcgt

SEQ ID NO: 1195 - DNA, 262 bp, Homo sapiens
acttaaaagaaagatttcccattgcatacaggttattggagaaattttccttttgttgcatttgtggaagttagttttctggcccgtggcctttaattttcttaatcaacctaattacatcaggatagaggtagagtttctgtaaaagaagagacattaagagttcctgaaatttatatctggcataccgataggcttatattcaaaacatcttagtcatacgaccataaattaaaagtggagtcactaaatagtttgcagt

SEQ ID NO: 1196 - DNA, 400 bp, Homo sapiens
acattctgcacttgacatcacagagcgaactgagattagcagtcctatgttctacaattacttaatgcttagataacatttgtgcaacttgtggtagagctagatttctgtctttctatatgcacatgaggtccatagcctatataataaaactggcaaataatgcatattacatgtaaaattacaaatgcataattgacaatgtaataagcaagtagacaaatgccatgatacagaagagaattattaaataaagcactgacattgtttgatacagtgaaaaaaacactgcaattccacttttaaaatttgaagctatttacgtttatctactgatcaatatgatcagctgaatttaatggaaaaaaaatccaagaccagcagttcctcacatttgagt

SEQ ID NO: 1197 - DNA, 511 bp, Homo sapiens
  misc_feature 73: n = A,T,C or G
tcacaatatcaagaagatttggacttttaagggtttcaccgaagtttgtgaccttaattagcttttacgttgntattcctacttttagcgaacaccacacagtttcaaaaatttagactatagtgtccgaacaggatgcagttaccatatgaagctttaactcaaaatttggataaagaaaaaaggcacaatgaacttcaactcaattttatgtgcacaagagttgaaaaatctgagccaccttaaagagaaattgattctaaaatttataaaacctataaataatcagaggccaaaccactatattaaaacagattctctagcaagtaaaaatcttgcagtttaaacatacgcttgtatccactttagatacaagacaaaactcactctttaaagtggctccaccttggcagatacatatatttgtaatgaatgcacacctgctatgtgttgtttatcagtgaaaacaccccagctgattcacaaagctctgatggcatctgtctcatct

SEQ ID NO: 1198 - DNA, 401 bp, Homo sapiens
acagcagtgataagcgggtaggcaggactatgtctcaccatgcagcagctctcaagcgtcacactgctcagctccgcgaagagttgctgaaacttccctgccctgaaggcttggatcctgacactgacgatgccccagaggtgtgcagagccacaacaggtgctgaggagactctaatgcatgatcaggttaaacccagcagcagcaaagaactccccagtgacttccagttatgagctgcattgatgtggacttcatagacacaaaggcttcgaagcacaagccaaatatgtcaatatttgtatgtaagaaactaattatgtaataggtaatgaaactgaaactatactatgcccttaaggagatccagtttaattcaaggtgatcttttatttacctgt

SEQ ID NO: 1199 - DNA, 254 bp, Homo sapiens
accttttccccccacagatgagaagtgtttgtaatggatttgtatttttcttaattttatgctctttagacgtttaaaagaaccaaaaaagaaacttttgcttcttcgttttcggttgggatttgcagtttaatggcctcagatccttctccagatccccagggtttctttgtcttatttatggagaaaaaccggtcactttgtccagcgcactgtgaggcccccactcaggccagccctggcccccccttggt

SEQ ID NO: 1200 - DNA, 393 bp, Homo sapiens
accaaatgtcgaattctagactgaggagtagagttcattggagtcttaaactctctgatatcacttaaagctggagtttattttaaaacaaatgaagcatgggccacctcatgatgcagtggctcctctctggttgaggagagggaaaattggaaaaactggtcgagtaattatcaataattttttttaaaaagaggatcccaaactgtaaaagattgaaataatctttctcaggattttttaaatgtctaagattatgatgtcatatctcccacttaccttataagtaaaaaggttaatatcaagtaacttattagctcttaaagtaaaattgaacttattaaaagctatctatgatttaatagatttaataaaattccttcacgacctggt

SEQ ID NO: 1201 - DNA, 329 bp, Homo sapiens
actcttgaaatggttatctttgtggatgatttttttttttaagctgaaacttacctcatgaataacttgattaaagtagtaggtgattaaaatttcaatagaatcaaatgagacaaaaattttaaactgactcatttgagtttcaactttacagtcattgaccataaagcacactaaaaatgtaagttatttttaaatacatctgaaataaaaatacttactaaaaaggaagaagccgaagatgtatatttagaccagcacacaattttgatttcaattagccttattctaatatttagcttttagatctttcatacacattttcacgt

SEQ ID NO: 1202 - DNA, 317 bp, Homo sapiens
  misc_feature 62, 297: n = A,T,C or G
actggaagatcattggtcagatgaatactgtgtctgacaaaaatgtaaactgtataaactgnggaacctcagctaatcagtattactttgtagatcaccatgcccaccacatttcaaacccaaactatctgtagatttcaaaatccattgtgtttgagtttgtttgcagttccctcagcttgctggtaattgtggtgttttgttttttgttttgttttcaatgcaaatgtgatgtaatattcttattttctttggatcaaagctggactggaaattgtatcgtgtaattatttttgngttcttaatgttatttgggt

SEQ ID NO: 1203 - DNA, 524 bp, Homo sapiens
  misc_feature 16, 17, 74, 101, 146, 179, 361, 389, 417, 429, 465: n = A,T,C or G
aataaccatgagctgnntcatgctacttagcttttatgtaaatatttcttatgtctcctctattaagagtattnaaaatcatatttaaatatgaatctatncatgctaacattatttttcaaaacatacatggaaatttagcccanattgtctacatataaggtttttatttgaattgnaaaatatttaaaagtatgaataaaatatatttataggtatttatcaagagatgattattttgtgctacatacaggttggctaatgagctctagtgttaaactacctgattaatttcttataaagcagcataaccttggcttgattaaggaattctactttcaaaaattaatctgataatagnaacaaaggtatattatactttcattacnaatcaaattatatgaaattacttgtgtnaaaagggcttcnagaatatatccaaatttttaaatattttaatatatntcctatctgataacttaatttctttctaaaatttaccacttgccattaaggctatttca

SEQ ID NO: 1204 - DNA, 530 bp, Homo sapiens
  misc_feature 499: n = A,T,C or G
acacaatggtttattaaaggaatgtatggcccacatcaacctagcaaggattctactggtaaaccttcccatggccaaaggaaaaacaagcaggagttgagtggctggggtggggtgcaggcaatggagagagggcagaagggtgtagaagctgaagggggctagaagcttactcctgagtttcttccttctgtcttcaaatctttacttcttatggccaaagacccagctgtttcataggctggagatgcactcttctagactgctcgagacagccagagacaggggaggagggaagaaggatactgtggaaagggatggcggggcaaacatttagagctagaagccactactgggccaatgctaaagtttctgtctctaagcctaaaaaagccagtgtagtagggcccttatcactcttagtttgctaggtttcccctctgaaataatgagcagatttagccaggctagcagaaaggaagaggacggggctgtgcangagtttagcagaatcttgattcttgctctat

SEQ ID NO: 1205 - DNA, 225 bp, Homo sapiens
  misc_feature 14, 18, 28: n = A,T,C or G
ccatgggatttgangatngagaatgganatagaacttaaatgattctaaattctacataaaagtgcaataatagctacggtatccggaagctacagattcagtgtgtggtggaggacgacaaggtggggacagacttgctggaggaggagatcaccaagtttgaggagcacgtgcagagtgtcgatatcgcagctttcaacaagatctgaagcctgagtgtgtgt

SEQ ID NO: 1206 - DNA, 371 bp, Homo sapiens
acaatcagtaaaatcaacacatcagtcttatattagaaagcatctctctcaagcataaaaacttgcagtaaacttggaagtatggaaagttctataactgaactttcacttctcccattccatactataactaccagtgacctggcccctacttcagcaatttttagaactgctgaacagagcaaaaatatcctttactagctgcaacatccaaacctcaaaaaaaggaattcctttggatgattccattcttaaaaactgaatgcacatctattttttttttaattttgtaaaaggctttctaaggctataagcagttaatctgaacaaaacaaaacaaaacaaaaatcacatataaaattcacccatgt

SEQ ID NO: 1207 - DNA, 464 bp, Homo sapiens
acagatatttcatgtagaattaattgctagttatgatgcttgtggatagttaactgtttttttttagtcaaaatgatcatgctacgaaaagatgcttctgagagaatgtaatgagtaactgatttttcttcctgagtcgcccttgccaaatatgttactgtattaattaatctaatattgagtgattatttgtaaaattatgaatatgggaaatccatctatctacagcctaagttacacataagtttcagaaagtctgattagactaaagagatatttcttctgggacagccttcttcttggtaattttgaagttctttttacaagttccttcctcagtttcagttctttccagtgttttgtagctcactgtcactcactgaatagagaaacgtgtgccctatacttcctgtgacaatcattttgctgacagaatgatggatgtttaaaatattgcacaaagt

SEQ ID NO: 1208 - DNA, 516 bp, Homo sapiens
  misc_feature 348, 382, 404, 413, 415, 418, 432, 433, 439, 445, 449, 463,467: n = A,T,C or G
accgtttcccctgcctgttaataggctgattcctgcaggtttgagtaaaggaatcatctcttccttcagtgccgcattgttctttgtaagagatccgtgtcagttcaaagttgtgtaatttaaaggctagagaagaaagaagtttaaattggatcccacagtaaatattcacggatatttcaaagtagaattgtccactgtctggggttgggttcaagcatcaaggtgatcgcttcctgaacatgttcattgaccatgaggagctgtttactctggctcatattagactaccagtaattattttcagacatgatgtctcttttgaaagaaatgactttgctggactangataactgcaggggtagaagactggaaatacggngagtcagggtaggtggaaacanaaatgagtngnaangaaaaaaaaaagannttcctncaaggncatntatggtcagtaatnaaancaaaaattcatggtatgtgacttaaagactttctaagacattgtacctc

SEQ ID NO: 1209 - DNA, 470 bp, Homo sapiens
acttctccatggagcagcctgaggcgatccctttattctgggcttctctcagaaatggattcccacacagtattcaaagcaaatttccccagaggaaatcctattggaagaacttaaaaactcagaatctttttctttgtccagagagttgaggaagcttaagctaaatgatacatgttttttaaaaaaaatcagattataaatttagtttttggtgattcattaaattctttactattatagttattttctagctgttcatcttttagctaaatttgttccaaagaagcaaaagtttggtttctactaagttctggattctggatgggagattgcactgtgtgtgacatgcaagtttcatggtgtgggagattgcagagcatttgggttactgcttttactctttggaagctgttatcatctgtatctgctttaaataaagtttaaagatttggaacaaaaaaaaaaaa

SEQ ID NO: 1210 - DNA, 520 bp, Homo sapiens
  misc_feature 465, 491, 504: n = A,T,C or G
aggtactttggcctctctgggatagaagttattcagcaggcacacaacagaggcagttccagatttcaactgctcatcagatggcgggaagatgaagacagatggtgcagccacagttcgtttgatctccaccttggtccctccgccgaaagtgagggggagactatcatactgttgacagtaataggttccaatatcttcaggctgcagggtgctgatggtgagactaaaatctgtcccagatccacttccactgaaccttgatgggacccctgtttgcaaattggatgcatcgtagatcaggagcttgggggctgtccctggtttctggtgataccaatttaaatagttgctaatgtcgtgactcgcctggcaagtgatggtgactctgtctcctatagatgcagacagggaggatggagactgggtcatctggatgtcacatctggcacctgagagccagancagcaggagccccaggagctgagcanggaccctcatgtncatgctgtgtcacctc

SEQ ID NO: 1211 - DNA, 450 bp, Homo sapiens
  misc_feature 131, 132: n = A,T,C or G
acaaattgctatttgctgtggggttatcagttggcctactttccaaaaccacgaccctgtcagatccaagcagcctgaaaattcttgtgctatctgaaatttcttgtgttacctcattagatctaaaactnntaccttgcattccatgtttccagaaagctagcacactgtcttgtaggcacactattgattcaatctggaaatcaaaggtgagttctgatgacaatttcctgctagattttaatcttccttggagatttactatttttatacaacagtccaagcatacaaggatggtatctctctccagttgggttacatgagtaacatttgtctgtggggtatctgattctgtaaaccatgaagaggtagaatttggattgaccgtctcaaatcgaaccacttggttgaagtctctacctctactgacaccaacacaaactaaagggt

SEQ ID NO: 1212 - DNA, 159 bp, Homo sapiens
ctcgcccagctcgcccagcgtccgccgcgcctcggccaaggcttcaacggaccacaccaaaataccatctcaaatggaacacgccatggaaaccatgatgtttacatttcacaaattcgctggggataaaggctacttaacaaaggaggacctgagagt

SEQ ID NO: 1213 - DNA, 103 bp, Homo sapiens
ttcaatgaatggaatcccgtaactcttggccagttcgtgggcttgttttgtatcaactgtccttgttggcaaatcacacttgtttcccactagcaccataggt

SEQ ID NO: 1214 - DNA, 130 bp, Homo sapiens
acatattgaccaatggcctctgaaaaagcacattttagatactgaaattgaaggaaagaaaatgcatcttcaaacattttttggaatctcaccacatatactttgttagatttgtgtattgtagggtgtt

SEQ ID NO: 1215 - DNA, 259 bp, Homo sapiens
actgctgcttatccaaaatatacaagacaattgatgttttatataaaaccactttataagttcatttgttcccaaaaacctttttttcttttttggccttgttaaaaaaaaatgttgttacaaatatttacagcattttcttctgttagacgaacattcttaaaaactgaaaaggggaattttgatgaacagaccacgtaaaacaccagacaatgtcagaggctcctagctgtgctattttttttttcttagatacagt

SEQ ID NO: 1216 - DNA, 196 bp, Homo sapiens
acctgtcttatggaagaaatatgcaggtatataagaccacgattttctaaagtgcatattagaatttttgtttttgtaaatggttaaatacatttcctgggtaacttaggaaattaagtttttcataaggcaacagatggttaaactgattgtcatgaatacccaaagatcatgtatataatcgaagtgtattagt

SEQ ID NO: 1217 - DNA, 480 bp, Homo sapiens
actattatctatgacttcatacagttactaattcaaatataaaagacaccacacttcgaaagaaaaaaattttaaggtaatggttttaattgaattaatgagatgaaaagatagtaaagccctgtttgctacttacatgaaagaagactttaaaaaataatcactgcacaaaatgtaaagggtggggttatgctgtgatattaattttcctcaataatgtttttcttgactgttcaagaacaaattaaagtttccacggcaaatttgttttcaaaatgccgaattgcgaaacaattgctggcttcacgtttctgaatacctttaatagtttctctgcgttgcagtttgtaagtttccttgtcatgacacagtcgataaataaagaaacccaggtgatcaatgttttcaatgcgatcagtaataaccatgtgctcatgaatcagataggactgaggcaaataggttccagccttgatgttc

SEQ ID NO: 1218 - DNA, 485 bp, Homo sapiens
actgtaggattacagatggcatcacattgactgaaacattggagcaaggggaaaatggttaaaaactttgatttttgggaaatgaagggtgggaaaaatatacacagaggtctgggaaggatatttcaggcaaaacacaaaaacacaaaacacaaaaacaatcctgttcaaggattgaagaataattcagactgagtcacaattctcataaagtaagaaatttcatcaaattctatgtagctttaaaatggcttcaggtgtttttcagatttagctacttaattttatttttttacttttttatttttttacattctaacatttaaaatccaactacagaaaaatttttaactgaaagatgccttaatagaatgatctatatcccttagagaaaagattaggacagtcctttatccccttgaattactttttaaatttttaattttctgattttaattgcaataactgattatcatatatcagta

SEQ ID NO: 1219 - DNA, 257 bp, Homo sapiens
accgagagccctctgcctcatagtccggtcgtaggcatcagacatggcagggaaacgatctccaaacctttcatcattgggccctctgagagggttctgaccactgaaaccaggtaggttgatatggtcacggatcagcatgatatctccaacctcaaacttggggttcagccctcctgctgcattggtgactaccagggtgtccacacccagaaggtggaaaaccctcactgggaatgtcaccttccagagtgggt

SEQ ID NO: 1220 - DNA, 191 bp, Homo sapiens
actataagtagttggtttgtatgagatggttaaaaaggccaaagataaaaggtttctttttttttccttttttgtctatgaagttgctgtttattttttttggcctgtttgatgtatgtgtgaaacaatgttgtccaacaataaacaggaattttattttgctgagttgttctaacaaaaaaaaaaaaaaa

SEQ ID NO: 1221 - DNA, 419 bp, Homo sapiens
acgttagactcagatggaaaagtattctaggtgccagtgttaggatgtcagttttacaaaataatgaggcaattagctatgtgattgagagttattgtttggggatgtgtgttgtggttttgcttttttttagactgtattaataaacatacaacacaagctggccttgtgttgctggttcctattcagtatttcctggggattgtttgctttttaagtaaaacacttctgacccatagctcagtatgtctgaattccagaggtcacatcagcatctttctgctttgaaaactctcacagctgtggctgcttcacttagatgcagtgagacacatagttggtgttccgattttcacatccttccatgtatttatcttgaagagataagcacagaagagaaggtgctcactaacagaggt

SEQ ID NO: 1222 - DNA, 375 bp, Homo sapiens
accttggccaagcttaaagagaagattttctcagggtatttattagtgtgtccagcagggtcaggaagcaggatggaaagatgcattcagactgttaatttattaacaaggcaaatgattttgtgtttcttgatgacagactattaagtttgggacttattttcccatttgagaagttataatatatatttaagatgataagtttcctgcttaagttgtgcctttcagcttcaatgagtttaaggagcactaagggtaatgataccaatgagggttggtttattatcaaacctgaatagctgtggtttctccagtaaatattttcttctactgaacatggagccattattaagagttgtgtgttttttattatgt

SEQ ID NO: 1223 - DNA, 273 bp, Homo sapiens
acatttcaggttaatagagaactacattttgggtttttagaaaggcagcaataattatattttggcttttagtctagatgcttaacatagttaaggcgacagttcaagcatattaagtgaaggtagttaaaatttaagaatcatcacaatctcttgaaacctacatacactgtttaatgcttacatggaatgaaaccagtgttcttaattggcattttacacacacacacacagaatttaaaaaaaaaaatcaaaggcaatcattctaaatgt

SEQ ID NO: 1224 - DNA, 530 bp, Homo sapiens
accatggagaaggagtcgaaaaccacccgattctgtcttatctgtaactatgtcagtcgaataattgaacccctgacctctagatgttcaaaattccgcttcaagcctctgtcagataaaattcaacagcagcgattactagacattgccaagaaggaaaatgtcaaaattagtgatgagggaatagcttatcttgttaaagtgtcagaaggagacttaagaaaagccattacatttcttcaaagcgctactcgattaacaggtggaaaggagatcacagagaaagtgattacagacattgctggggtaataccagctgagaaaattgatggagtatttgctgcctgtcagagtggctcttttgacaaactagaagctgtggtcaaggtaaagtcagcttactaactttggggaaaggaatattaagtcatcataccaaaagttttttttattataggatttaatagatgagggtcatgcagcaactcagctcgtcaatcaactccatgatgtggttgtagaaaataact

SEQ ID NO: 1225 - DNA, 91 bp, Homo sapiens
acttgtggaagatggccacgaggaggccaatggcctgatccagggggcatgccatggctgagggctgggcttggagcggtagggaggcggt

SEQ ID NO: 1226 - DNA, 254 bp, Homo sapiens
attaggaggaggaccttagggagaccaagaggagagaagcatttcttttgatgaagtcacatcctgtctatgagcccactaatgctgtaacattggcctgaaagagagtgttctttaaaagcctttctcggctgttagtataaaaacatgatggtatcagctcttagcatgtttgcttgacccttatggaaggtataaatccacagaacttccttcccagagaactgggaaattgtcctagaaataaaccttgt

SEQ ID NO: 1227 - DNA, 390 bp, Homo sapiens
atttaaaggaggtgactaaatttttggcactggtctgcattctaagggaagaaagctttgaaagaaaaggtttaatagactacaacttccactgtttccgaaaagctattcatgaggtttttgaggtgggtgtgacttctcacaggagctgtggtcaccagactagtgcctccagtctgaaagcgctgacacacaatggcacgccacgaaacgccatctagtctgaatcccagcgtcggggctctgtgccagcttactcttcactccagggtcggatgccacgtgctacaggacatgggagctgctgcttgtgggaatctggtgcctgttccactagagacaaggggtagagtttctcatttggatgaaaaccccttcaactggtggtgt

SEQ ID NO: 1228 - DNA, 363 bp, Homo sapiens
actagaaccataaagttctatctgatggtaaattatgtataaaactaagataaaacagataattatgctctatctcatatctactgaaagtagaaaaggaggaagagtgacacttttaaatcaaactgctctagttttagcttaatggatggttaataaacacactgctttacgctgaagtgatcagatagctatttctacagttcagaagaacttaaaaatcaggttttaaagacaaaagaaagcagactcaaaacacagacaaagcagagaagaaaacaatgcccatgagatggtcactatttagacagtattataaaaagctaaagaacacttgggctttacttcactttgatgtcttgt

SEQ ID NO: 1229 - DNA, 384 bp, Homo sapiens
acaacagaataatgcatgatgaactcacctaattatgaggtgggaggagcgaaatctaaatttcttttgctatagttatacatcaatttaaaaagcaaaaaaaggggggggcaatctctctctgtgtctttctctctctctccctctccctctctcttttcattgtgtatcagtttccatgaaagacctgaataccacttacctcaaattaagcatatgtgttacttcaagtaatacgttttgacataagatggttgaccaaggtgcttttcttcggcttgagttcaccatctcttcattcaaactgcacttttagccagagatgcaatatatccccactactcaatactacctctgaatgttacaatgaatttacagtctagt

SEQ ID NO: 1230 - DNA, 162 bp, Homo sapiens
accgctcggccatctacccgacctctgccaagcaaatggaggcagccctgagctccaaagagaactaccaaaaggttctttcagagcacggcttcggccccatcactaccgacatccgggagggacagactttctactatgcggaagactaccaccagcagt

SEQ ID NO: 1231 - DNA, 551 bp, Homo sapiens
  misc_feature 498, 505: n = A,T,C or G
acacttgaaaccaaatttctaaaacttgtttttcttaaaaaatagttgttgtaacattaaaccataacctaatcagtgtgttcactatgcttccacactagccagtcttctcacacttcttctggtttcaagtctcaaggcctgacagacagaagggcttggagattttttttctttacaattcagtcttcagcaacttgagagctttcttcatgttgtcaagcaacagagctgtatctgcaggttcgtaagcatagagacgatttgaatatcttccagtgatatcggctctaactgtcagagatgggtcaacaaacataatcctggggacatactggccatcaggagaaaggtgtttgtcagttgtttcataaaccagattgaggaggacaaactgctctgccaatttctggatttctttattttcagcaaacactttctttaaagcttgactgtgtgggcactcatccaagtgatgaataatcatcaagggtttgntgcttgncttggatttatatagagcttcttcatatgtctgagtccagatgagt

SEQ ID NO: 1232 - DNA, 145 bp, Homo sapiens
actgccgctgctcgtcaggaggccgcttgaggatgccctcgacgatgcgcttcagttcgaacaccgtgctggactccttggcgtccgtgaagatggtggtcttgtggcgccggatcatgaggaacacgtccatcgcggctgctgc

SEQ ID NO: 1233 - DNA, 523 bp, Homo sapiens
acccaagcaaagaaacagcccactggaagcctccaccttggaatgatgtggaccctccaaaggacacaattgtgaagaacattaccctgaactttgggccccaacacccagcagcgcatggtgtcctgcgactagtgatggaattgagtggggagatggtgcggaagtgtgatcctcacatcgggctcctgcaccgaggcactgagaagctcattgaatacaagacctatcttcaggcccttccatactttgaccggctagactatgtgtccatgatgtgtaacgaacaggcctattctctagctgtggagaagttgctaaacatccggcctcctcctcgggcacagtggatccgagtgctgtttggagaaatcacacgtttgttgaaccacatcatggctgtgaccacacatgccctggaccttggggccatgacccctttcttctggctgtttgaagaaagggagaagatgtttgagttctacgagcgagtgtctggagcccgaatgcatgctgcttatat

SEQ ID NO: 1234 - DNA, 336 bp, Homo sapiens
  misc_feature 13: n = A,T,C or G
actcaatattctnaaaacctcaaataattgacttgattttacacaacatccttcccttttctacaagttaatttttttacaaatcatttgggttatctcctaaataggttatattttattgcttctagaaacaatgtttcaaaatatatgtgcattatcagtaataatttgtataaatatttcccacaacaattttcataattttcaaagactaatttcttgactgaagatattttgctagggaagtgaaactttaaaattttgtagattttaaaaaatattgttgaatggtgttcatgcaaaggattttatatagtgtgctcccactaactgtgt

SEQ ID NO: 1235 - DNA, 434 bp, Homo sapiens
accaccagatacttaaagcttcaaaaagactgcccctaccaccacaggaggaccagcctaaccatacgctccaaaagatggctgtgatagatcttgtgaagcaattactgagcagatcaagatctttgggaaggaacactaaagatgttttgaatgaattatagtccactggcattttagtgtattttttttctttttagaaacacacatttctaaaaatgtcatgttacattcctgcatgtcccttttgatagcattagtggatccattggatttcttttttctttttgtgagacagcttttagtcctacctgaatttatgtgtgtttttccgacagtggttaataattatattggtgatgtagcagcaattgtgttggcagggttttcatatattattagtaattaacactaactgttggactgacttgtgt

SEQ ID NO: 1236 - DNA, 519 bp, Homo sapiens
acaaaacaggaagagatcaggctcttgtcacccactcctaaccctctgcagatttcctccgggatgctccgagatgggctggacctctgggaggttcccagagggtcggaagggaggtcctgctctgatccggggccagtttcgtcaggaagagggcggggctcaggatgctcataggctgggggcggagttttgtgtcccagactcgggatacgaaggagaggaaactaggatttccaaattctggagcaggactgaagttatttggggcagggagcttggattcgcaagatatggaattctgaagtgcggaaatatactcctagggactgagtggtcctaggctcccgggctggaggtgggacctgtgctccttgggttaagggtgaaacctcagctcctacaagctgggaggagccctgagtaacgttggtctggctctaggtgagcggttccgaggaggagcttgggtttctaggggctgggcctttaaagactggtaattaggacccagcgtga

SEQ ID NO: 1237 - DNA, 242 bp, Homo sapiens
actatgtaaattatttttgcaacttctttaacgatatcacggcaggtcatttctttcatctgaagcttctctatttccgtctttgcagcttgcctggctttgccgatggcacagccccaataaccgtatgaaacacctgatgggtcaatcatgtagagttgcgcaccgtcattcacactgtaagaccctaacatgaaactgcagccaaaaggtctaacagcactgtagagtgtatatgcatg

SEQ ID NO: 1238 - DNA, 385 bp, Homo sapiens
acatatattaaatggctatagcataaacattgttctatgggattttatagaagaaaaatcaagtggggagaattacttatgaaacattaacaaaaacccgtgatattgaagaacaagatgttctcatattcatttgatttcatctacttatttttggtgtcattttattgatgctggcccagactttccatttcccgtaattattaggtcagaaaaatgaaagcagcgggagggaacgcggtaaggcacctgtgggagacgggagcgctcctccgcaggggtgagacggtggctgccagtgttgagttcgagctgacggtgtgccaaggtcctgttttgctttatgccgttaagtgaagcgctggaagtgctggtgctcagaaac

SEQ ID NO: 1239 - DNA, 256 bp, Homo sapiens
ctgaagtggcagcagcatcagggattgcttcctcctggtatgaccatagatttgtttcgaggcaaggcagctgtcaaagatgtggaagaagaaaagtttcctacacaactgagcaggcatattaagtttggtcagaaatcacatgtggagtgtgctcgattttctccagatggtcagtatttggtcactgggtctgttgatggattcattgaagtatggaactttactactggaaaaatcagaaaggatcttaagt

SEQ ID NO: 1240 - DNA, 413 bp, Homo sapiens
  misc_feature 13: n = A,T,C or G
acctgaagtgtancgaaaatgctactatgactcttcctggaatacacccacctaccttgaaccagattatggattggatatgtctacttctggatgcaaattttactgttgttgtaatgatgccagaagcaaagaggctactgataaatctttacaagcttgtaaaatctcagatatctgtttattctgagctcaacaagattgaagtaagttttcgggagctacagaaattaaatcaagaaaagaataatagaggattatattcaattgaagtgctggagctcttctgatattatcaattctccttcatagacattttataaagctcttttatgtgaactcttgcttcatccaggcaagaacggtgttttgtttgcgaccatctcagtgtcaagagaaacgtgtcagtgagt

SEQ ID NO: 1241 - DNA, 535 bp, Homo sapiens
accactaatcgggccaatatggcttgtgagcaaaatgggtgaaaatagagggaactgactgggacctgttgtctaacatcattttaaggttgaacttgagcaaagacttagagaaagctgatggaatgccaagcatcaacgtgaagagaccctctatgcacacagtggatatgttatgcctggctgtagccaccttctcttctgaaaacaagatgggaatgacggaactgtattaaaagattaagttatccactagggagcatactagcacacttccagatcagccttgagatgctagacttcagatacagggacttgtgtcaggtggcctctagaaatgtggaagactaagatttagaaataaactaatttaaaagcaaacaaacaaaaaaaactttcgcctaggatgatctgtttacaacagaaacaaaaacattttccagtttaatccatttgactgaaagtcattgttgggctgacccttaaggaaaacttaagtttaaacttcctttgcatagtatgttttctctttttt

SEQ ID NO: 1242 - DNA, 205 bp, Homo sapiens
acaacgttaaattgtccgatttatgtgtattacttaaagctataaattgaactagatcttgccgtgctctgtattgagtataatttgtatacttttttataattaatgactaaatgatcactttggaggcagggtggtgggggtgtattagcagccaaataagcacatctgatcaaaaagaaccaggcttagattttttttaagt

SEQ ID NO: 1243 - DNA, 125 bp, Homo sapiens
tttttttttttttttttggttgacaatgagaatatttattgagggtttattgagtgcagggagaagggcttgatgccttggggtgggaggagagacccctcccctgggatcctgcagctctagtc

SEQ ID NO: 1244 - DNA, 356 bp, Homo sapiens
acatgaaactccagcagatttaatattggcatccatcatctagtcaaacctctcacatgttcttcaaatcaatcaaatttgggattctcaacattttctgtgtcaataaaaggtgtggaattagtagattcgatgaagacctgtttttccttgccacattggacttccagacgccatttggattgggtttagaagatggggaaatttagaagacgtttcttggcctgagtctcttaagagtagagatgcagaagagagagtgagaccacgaagagactggctgttgactgcagggcaccaccagccgccttggtggtggcattagttggatttggggccaacccagagttggaagt

SEQ ID NO: 1245 - DNA, 536 bp, Homo sapiens
actatctcaatagctgtatagctaacttatgtaaatcatatttatgctaattgaagagaatatatttcaccttcaggatattgtattcattttttctagccttaataaacattttataaatactgacactggggataaagttactgataatattatatttactttggcttcgcagagtaaaaattgttattcagtcacatacaacattctcgcatttttttagtcaatcctcaaactacctgagatgtaaccattattactcagttataaaaagaaaccaagattcaggtatactaaataatttgtgagtattcatgacagaacatggcaggtttgattgcaactctgtttgattccaaagtgtttgctctttccacttcatcgtaatgtatttccactttatcataatgtatttctggcaagaagcataagaatcaaaaacgtgacctgaaaaactactatggaattatttttaagtggtttgcatagactttgtttttagactttgtttaacttttcccaaaaagttgtacctc

SEQ ID NO: 1246 - DNA, 531 bp, Homo sapiens
accatttttagacttctgtctttatataatttagtttgtaaaacctagtttcatgtttaatgaattaagaaacaacatcagaacagtttagccagattttaataggcaaaaaagggttgctttggcaatggataaaagaataactgttataatacaaatctttatttaatctactttattaaatattaaaatgcaataaggcaattattgtttttaagacacttgaaattgcatttaataaatggataactggccccacacctgacatattgcacccctacttttcttctctactctaaggaaccaaaaaaattattttaaaaaacaaatcagtggtctttctaaaaacatctcaaagaggttctgactactactaaggtatttattaaatacaaatatctgaaaaataagacagccaataatatcttttaaggtatttctgctgtcttttgttctcttaaatctactcagaatggttcaactgaaagtatcccaactgaggaataaataggtgtaatttattgcttaatt

SEQ ID NO: 1247 - DNA, 498 bp, Homo sapiens
ggcccagcagccaccacagcgcctgcttcctcggccctgaaatcatgcccctaggtctcctgtggctgggcctagccctgttgggggctctgcatgcccaggcccaggactccacctcagacctgatcccagccccacctctgagcaaggtccctctgcagcagaacttccaggacaaccaattccaggggaagtggtatgtggtaggcctggcagggaatgcaattctcagagaagacaaagacccgcaaaagatgtatgccaccatctatgagctgaaagaagacaagagctacaatgtcacctccgtcctgtttaggaaaaagaagtgtgactactggatcaggacttttgttccaggttgccagcccggcgagttcacgctgggcaacattaagagttaccctggattaacgagttacctcgtccgagtggtgagcaccaactacaaccagcatgctatggtgtccttcaagaaagtttctcaaaacagggagt

SEQ ID NO: 1248 - DNA, 368 bp, Homo sapiens
acggagggtcaactggagggccaacttttctacatatgggttctgcaagactttctgtgggacttgagtatgggcagattttggtatatgtgtggccctggaaccagtccctagcgtatacaagggatgactgtattttaatggtttatagtgttaaaaagagaaaaatatccacataaacacaattttgaacactgaactattttaatatgaattaatgtcttatgtttattaccaattgatcttcaaattgcagcagcccatgagtttggttgtaagtgttcttgccattccaccccagctgtcactgagtcagtttaaaatacacacacacacacacacacacacacacagacacaagccttttg

SEQ ID NO: 1249 - DNA, 86 bp, Homo sapiens
acaacaatatgaagtccacacatctgagcaagacggaattctttcccatctacacaggcgaagcagacctctttccatgttcgagt

SEQ ID NO: 1250 - DNA, 365 bp, Homo sapiens
acccggcctcaaacaggttttttaatgcagacataagtgccctattggggtgggggagccaaaaaagacattagtaaggaagaggagcaaacaccagaattcatttatttatttctgtttgcttggacacaggttctcacttttttgtccaggctggagtgcaatggcgtgaacatggctcactgcagcctcaatctcccaggctcaagtgaacctctcacctcagccttccaagtagctgggaccacaagtgaacaccaccacacccggctaatttttgtggtttttttgtagagacagggttttctcatgttgcccaggctggtctcaattcaggcctcaagcgatccgcgtgggcaacatgg

SEQ ID NO: 1251 - DNA, 296 bp, Homo sapiens
acatgtgaaaatgatgccagaattccagaaaagttcagttcgaatcaagaaccctacaagagtagaagaaattatctgtggtcttatcaaaggaggagctgccaaacttcagataataacggactttgatatgacactcagtagattttcatataaagggaaaagatgcccaacatgtcataatatcattgacaactgtaagctggttacagatgaatgtagaaaaaagttattgcaactaaaggaaaaatactacgctattgaagttgatcctgttcttactgtagaagagaagt

SEQ ID NO: 1252 - DNA, 167 bp, Homo sapiens
  misc_feature 79: n = A,T,C or G
acaagcttttttttttttttttttttttttttttttgagatggagttcactctattgcccaggctggagtgcagtggcncaatctcggctcattgcaagctccgcctcccaggttcacgccattctcctgcctcagcctcctgagtagctgggaccacaggcgtccg

SEQ ID NO: 1253 - DNA, 222 bp, Homo sapiens
acgtgtcagcattatttaaatcaataatgcatttcacaattattgcagaaacatcactgagacatcgtaaattgtcaaactgacttgtaatccagttagatacaatttatacagaaatctatttggaattatacctaattactttttactaagaaacttcaaataattttacttcctgaagttccagattacagttgtatacacacatgcatgcatgtgtgt

SEQ ID NO: 1254 - DNA, 587 bp, Homo sapiens
  misc_feature 10, 211: n = A,T,C or G
actggctgangattctatctcagctgtcttttctaactgtgtaggttgagttttgaacacgtgcttgtggacatcaggcctcctgccagcagttcttgaagcttctttttcattcctgctactctacctgtatttctcagttgcagcactgagtggtcaaaatacatttctgggccacctcagggaacccatgcatctgcctggcatttangcagcagagcccctgaccgtcccccacagggctctgcctcacgtcctcatctcatttggctgtgtaaagaaatgggaaaagggaaaaggagagagcaattgaggcagttgaccatattcagttttatttatttatttttaatttgtttttttctccaagtccaccagtctctgaaattagaacagtaggcggtatgagataatcaggcctaatcatgttgtgattctcttttcttagtggagtggaatgttctatccccacaagaaggattatatcttatagacttgtcttgttcagattctgtatttacccatttttattgaaacatatactaagttccatgtatttttgttacaaatcttctgaaaaaaaacaa

SEQ ID NO: 1255 - DNA, 300 bp, Homo sapiens
  misc_feature 51, 130, 198, 203, 216, 217, 230, 240, 263, 274, 285: n = A,T,C or G
cttttttttttttttttttttttttttttttctttaagctcctttcttacncagggaatgagggggagctatgttctttcttcactcagcagtaactgaaaaatatgtccttaacatttcaaaaaagcanatcgtccctgtgctataaccactaaagcgtggaggtgaaatggcatgggtgtcctttatgtcaccatntgtcnacgttaatcaatnnaagcatggataanccaaactcgnggtttctttggagagcataaatntgataatacanaaacattccanagtctaaaaatttcc

SEQ ID NO: 1256 - DNA, 142 bp, Homo sapiens
accaggtctgtgcagctgatatgaatgtcttgaagagtcatgtggaacaacttgtccaaaatcaattcatatgaaagctttcagagtaaatttttttttctagctataagcatgcaataataaatctcaaacactgatttgg

SEQ ID NO: 1257 - DNA, 231 bp, Homo sapiens
actaaatggtggtctaggagcagctgggcggatagcaccgggcatattttggaatggatgaggtctggcaccctgagcagtccagcgaggacttggtcttagttgagcaatttggctaggaggatagtatgcagcacggttctgagtctgtgggatagctgccatgaagtaacctgaaggaggtgctggctggtaggggttgattacagggttgggaacagctcgtacctg

SEQ ID NO: 1258 - DNA, 533 bp, Homo sapiens
acacagattcccctttcagcagtcaacttgcctttcttttttttcttttctttttctttcttttgagacagagtcttgctctgttgcccaggctggcgtgcagtggcatgatctcagctcactgcaacctccgcctcccaggttcaagtgattctcctgcctcagcctcccaagcagctgggactacaggcacgtgccaccacgcctggccaatttttttgtactttcagtagagacggggttgcttttctattcccaagtccaaaagcctatgaagagggccagcgcaatggctcatacctgtaatcctagcactttgggtggccaagacaggaggactgcttgaggcctcacgtcaagttcaacatcagcgtgggcaacaaagtgagaccctgtctctacataaaagtaaaatcaaaagtctctggagagaattgtgttggtccagctcgggttagttgtccattcaaccggtgatacaggcagagttggggagtcatggcttctgaagcccacagtatcgactgggagca

SEQ ID NO: 1259 - DNA, 257 bp, Homo sapiens; identical to SEQ ID NO: 1118

SEQ ID NO: 1260 - DNA, 102 bp, Homo sapiens
acactatcttatgtaacctgtctggtgagtttgtttggacaacctaactcagctttatttgacatggaacctaaaatagaagataagatcttgatattctgt

SEQ ID NO: 1261 - DNA, 476 bp, Homo sapiens
actatcgtttgaaatgggaaccagatatgtttccattttatacagataattcagttgcttgaagaagagggacacaggagaaaagatttaaactattggctaaaatgaggtgtcttattattgattttcatctatatcttgtcccataatcaggaataaacagtagctacactgccttgtgtggcagccagagcgctgcttgcttgcacttttaatgattccatcaataccatgtagattgaattagcgaggagaagtaaacctttcatttctttgccagactatattgggaaatgaaaatccgtcattacttttccttgctagcaattgttcgaatatctgggataaagaaatacatacaggaaaatgttagggcagaccaagtattaaaagctaggacagagcaggacaaaggaggaaggataattctacttgtttggcaaagttacatcagttgtcttactgacacatcaggt

SEQ ID NO: 1262 - DNA, 291 bp, Homo sapiens
acagcattctggaataaagcaagagtgttcattcacacacacagtagcttcaaaactgttcgatctgtttgttcccatgtagttttctaaagatggaaaaaaaggactttggtcatcaagactactgtggccatattagattactggaacatctaagcatcagtgtgtgaccatgcgaacaaaagacttcggggagtgtctatttttaaaaaggtttatgtgtgtcgaggcagttgtaaaagatttactgcagaatcaagcccacttttaggcttaggaccaggttctaac

SEQ ID NO: 1263 - DNA, 293 bp, Homo sapiens
actgaacacaaaatacaaacaaatacattttattgcacataaaaatattttaaatgaagtattgaagtattgcacgtaatagaattgatttaggaaagtcacaaacctattataagactagtattattctaggtctgaagattacagaatatttcctaatagagatttgccacatcacatattgcacattttccaacactattctacgtcttgcaaatattcctcatagtctttgcttatgtcttttctctgtaagacactgtataaaagattataaaggcaaagaaatatgt

SEQ ID NO: 1264 - DNA, 389 bp, Homo sapiens
acgctgcttcttcagagcaatacgccgccgtttgtgctgcaggacacgtggagtaacaagacgctgaatcttgggtgctttggtcctaggtttcttacctaaaaattcaaaggactcaatcatttcaatatttgttttgttagaatccacatctactttaaaaacatcagaaataaacgtaagcttaacagcatctatgaaaacctataatgaggcctttaaaatcaaatcagaactattctaaaatgctttttgcccctccacagaaatctagaagattggttaaatattataaaaatataagggaaaccaagtcctgaaaaataaccaggctaacttttactaccttccagttttactaaaatacagtggcattatgttaatatata

SEQ ID NO: 1265 - DNA, 492 bp, Homo sapiens
ccgcatttggattggatgaattccaaattctgcttgcttgctttttaatattgatatgcttatacacttacactttatgcacaaaatgtagggttataataatgttaacatggacatgatcttctttataattctactttgagtgctgtctccatgtttgatgtatctgagcaggttgctccacaggtagctctaggagggctggcaacttagaggtggggagcagagaattctcttatccaacatcaacatcttggtcagatttgaactcttcaatctcttgcactcaaagcttgttaagatagttaagcgtgcataagttaacttccaatttacatactctgcttagaatttgggggaaaatttagaaatataattgacaggattattggaaatttgttataatgaatgaaacattttgtcatataagattcatatttacttcttatacatttgataaagtaaggcatggttgtggttaatctggtttat

SEQ ID NO: 1266 - DNA, 533 bp, Homo sapiens
actcattttaacattttatgcatgagcatgtgtcacaccaattttgggggtaacagttttgacaacaggaacaaatctaagcaatcgacaaaacagaagccggataactggctctgacccccacccccaacatttaagagatgcaaaggacacctgaattaggttaaaaaaatcaagttgatatggatatttcaacagtgttctgtgctgcaaaactgaaaataaaaccatttaatacacagcccattaatatctgagttacgcttttaggaactgtcaactcgaagattcataaaaagttgtcagcttttaaaaataaactttaagttatctaataatcaggtgaatttcaaaggaggatttactcacaacttgaaaataaattctctttcaacttcttaaaatatcctcattcagctaatgaaaaaggaaacatatatgtatcttttcggaagctcagactagcatatgcccaaaagcctaaagttaaattaatggccaccaaaattgtaaggaaatataaaaaattagga

SEQ ID NO: 1267 - DNA, 257 bp, Homo sapiens
actcccgattgaagcccccattcgtataataattacatcacaagacgtcttgcactcatgagctgtccccacattaggcttaaaaacagatgcaattcccggacgtctaaaccaaaccactttcaccgctacacgaccgggggtatactacggtcaatgctctgaaatctgtggagcaaaccacagtttcatgcccatcgtcctagaattaattcccctaaaaatctttgaaatagggcccgtatttaccctatagt

SEQ ID NO: 1268 - DNA, 540 bp, Homo sapiens
accagttctaaatgtcagttataagccacagaaaattagtcccaaatcaactggaagtgttcgccagttactacatgaaaagataagagatgcttatactcacccacaatttgtgaccgatgtaatgaagcctctgcaaattgaaaacatcattgatcaagaggtgcagacattatctggtggtgaactacagcgagtagctttagccctttgcttgggcaaacctgctgatgtctatttaattgatgaaccatctgcatatttggattctgagcaaagactgatggcagctcgagttgtcaaacgtttcatactccatgcaaaaaagacagcctttgttgtggaacatgacttcatcatggccacctatctagcggatcgcgtcatcgtttttgatggtgttccatctaagaacacagttgcaaacagtcctcaaacccttttggctggcatgaataaatttttgtctcagcttgaaattacattcagaagagatccaaacaactataggccacgaataaacaaacttaattcaattaa

SEQ ID NO: 1269 - DNA, 517 bp, Homo sapiens
gcaaaatattttattcaacaatttgcaatgtaacaattctcatttaggaaaaatagccgctcccgcctggaggaagcttcttgaatcaaaagtcgtggcagtcgaccccagaacagcgggcagagccgaccggaagaggtcccaggattcacacgagctgaccgagggacagagagggctgccccgtcacagggactggcctttctccaagtgacaaggacaaatggatccagcgggacacgcctgtggaacattttggaaaacatcctgggtggtctgggctaaatgatcaagtgaaacagaaagccaggaaggatctgtgctaattccacattctacaatttctacacttaaatttaaaacaccaaacagtttgtattcctccagcagaacctacagaaattatctactgatttttattagtatttaaatcttttcttcagtctctttagacttgacaagaatacgaagagtttcagaacagtcagagaagccttaaagctttgcatcagtgaga

SEQ ID NO: 1270 - DNA, 629 bp, Homo sapiens
  misc_feature 513, 568, 582, 599: n = A,T,C or G
acctgccagaattagcaagagctttctttaagaagacatttgtcaaactcaacaaattgaaggttaacaccttaagagttgtagttactgaccagaaatatggacagacttcttagacttggaggaggtatgcctggactgggccaggggccacctacagatgctcctgcagtggacacagcagaacaagtctatatctcttccctggcactgttaaaaatgttaaaacatggccgtgctggagttccaatggaagttatgggtttgatgcttggagaatttgttgatgattataccgtcagagtgattgatgtgtttgctatgccacagtcaggaacaggtgtcagtgtggaggcagttgatccagtgttccaagctaaaatgttggatatgttgaagcagacaggaaggccggagatggttgttggttggtatcacagtcaccctggctttggttgttggctttctggtgtggatatcaacactcagcagagctttgaagccttgtcgganagagctgtggcagtggttgtggatcccattcagagtgtaaaaggaaagggttgtnattgatgccttcanattgatcaatgctaatntgatggtcttaggacatgaaccaagacaaa

SEQ ID NO: 1271 - DNA, 487 bp, Homo sapiens
accctcaataaggttgccatgaagcatccgtcagctgtgacagcttgtaatctggatctggagaacctggtcacagattcaaaccgcagcattgccacgctggccatcaccaccctccttaagacgggcagcgagagcagcatcgaccgcctcatgaagcagatctcctccttcatgtcagaaatctcggatgaattcaaggtggtggttgtccaggccatcagtgccctgtgtcagaaatatcctcgcaaacacgccgtccttatgaacttcctgttcaccatgctgcgggaagagggtggctttgagtataagcgcgctatcgtggactgcatcatcagcatcattgaagagaactcagagagcaaggagacagggctgtcacatctgtgcgagttcatcgaggactgcgagttcacagtgctggccacccgtattctacatctcctgggccaggaggggcccaagaccaccaatccctcaaagt

SEQ ID NO: 1272 - DNA, 160 bp, Homo sapiens
actacactttatcttaattcttaatttaaaaacatgtttacaagttacaaccaacttctatgaaaagttgaaaagacaaaaaaaaaaaaaagcgagcgagagagagagcgagagagagagcgagagcagaagaaattcctaaaagtcgatttatttttgt

SEQ ID NO: 1273 - DNA, 438 bp, Homo sapiens
acatctattcctcagggagtgtggaggcacagaaactgttattcgggcattctacggagggagatattcttgagcttgttgatggtcactttgataccaagattggacacaaagtagagagtgaaagttaccgaaagattgcagacagcattgggtgctcaaccaacaacattttgtttctgacagatgttactcgagaggccagtgctgctgaggaagcagatgtgcacgtagctgtggtggtgagaccaggcaacgcaggattaacagatgatgagaagacttactacagcctcatcacatccttcagtgaactatacctgccttcctcaacctagagaagggttgttaaggcagaccgccctgttccccagagttgtccctgtagtgtctaggtttattctaatggtaaaagtaacttacttaaaaaacatatgt

SEQ ID NO: 1274 - DNA, 423 bp, Homo sapiens
acagtagcatgaatcttgggtatttcgcataatcagttaggtcaagtgaagaagtcgaaaatgtgataagaaatttgtgtgtgtgtgcacatgtaaatctgtaagccagttgacccaagagcaactgaaacatctaatttgttcagctgagatcagacattgttaaatttccattttttagaaggcaattaaaaattacaattccaacagcccacaaaccaaacaaaaaaaactgtagagagaaattaaaactatattcaaagagcctttttttttcagctcaatttcagcaccccaaggaaaataaaagcatccatgactatcacagatgaaaacaaaatgaatgtcattggaatcagttatttttccccactgaggtataaaatctatatagaaatttgatactatactataacaaattgt

SEQ ID NO: 1275 - DNA, 418 bp, Homo sapiens
acctatcaaaactattgtttaaaaagtatttttatacactgctaatctaaaattgtatttcagattgtgcctgtcataacaatagcaaatgtaaaaagttctctttcccaccacttgtttataaacctcatagttgatatttttagtgttcctactgttaaaatactctctccttgggctttgctgatactggtctttaatattctgataggtgaatttttctaatggaatgaacccatgcatatatagtatttatatgaatattttagcagtgtaatatgttgaattctagttctctgcattaccattattacgttaaagtattttttaaagcttaggtgtgaagatatgtgtctattgcagacgtccttgaaaactgcataaaacagtatgtgcctggtgtggatcttaccaaagt

SEQ ID NO: 1276 - DNA, 525 bp, Homo sapiens
acctagtgacttccaaccaaagcctttgagtatgcactaaataggtgagaagaaaggagagaaggtttttaggttagaaacctttaaccgatagaaggatatggtatgttgtaaagctggaaccaagtttgcatttttgagggcttgagatgaagggaagactcttaccagatagtaagacagctgagttttcctcagttttctcgtcttaacactagtggacaattctagcattttgtttggaggatttcagagttagcctcatggaattcaggattttttagcaagtttgcttttggttttatcttggcttttagtaatcatgttggctggtctggtcacaggtgactgtgaaacagatgccctggtcttgctttcatcactctaggatcatgaagtgctatgctatttcctggttatgaatattaaggttggaattacatttttattgattgtttggatcagagctcagttcctgtagaaaacgaactgtaaaagaccatgcaagaggcaaaataaaacttg

SEQ ID NO: 1277 - DNA, 504 bp, Homo sapiens
actctatgagtggggtggtttgagtgtggtaggcttgcaggcggattttcaaggccttttcattatcatctgatcgacggatcaagggttccccggtgatgtcatctttcatgggctcttttggagggttgaactcctcgtggtaggaacggccactcttggggtgaatcagccttcctgtgattcttcggatcagcagagagtctgggatgctgaattcaatcacagaatcaagctcctctttcctcttctccatgaggtcatcgagcatttctgcctgcctcacagtccgagggaagccatccagaagaaaaccatttttgcacaagggggtctccaaattcttctcaatgagctccactaccatttcatcactcaccagtttcccagcatccatagttgccttcagcttttttcctagctctgagccagaagccaccatggccctcagcatgtccccagtagctaaatggcagacacagaagttttcagccaatctgggtg

SEQ ID NO: 1278 - DNA, 568 bp, Homo sapiens
  misc_feature 494: n = A,T,C or G
caaatttgagacaaatagtcggattagaaataaagcatctcattttgagtagagagcaagggaagtggttcttagatggtgatctgggattaggccctcaagacccttttgggtttctgccctgcccaccctctggagaaggtgggcactggattagttaacagacaacacgttactagcagtcacttgatctccgtggctttggtttaaaagacacacttgtccacataggtttagagataagagttggctggtcaacttgagcatgttactgacagagggggtattggggttattttctggtaggaatagcatgtcactaaagcaggccttttgatattaaattttttaaaaagcaaaattatagaagtttagattttaatcaaatttgtagggtttctaggtaatttttacagaattgcttgtttgcttcaactgtctcctacctctgctcttggaggagatggggacagggctggagtcaaaacacttgnaattttgtatcttgatgtctttgttaagactgctgaagaattattttttttcttttataataaggaataaaccc

SEQ ID NO: 1279 - DNA, 346 bp, Homo sapiens
acttggagggctcagggcagtggcttctttccagtatggaaggatttcaacattttaatagttggttaggctaaactggtgcatactggcattggcccttggtggggagcacagacacaggataggactccatttctttcttccattccttcatgtctaggataacttgctttcttctttcctttactcctggctcaagccctgaatttcttcttttcctgcaggggttgagagctttctgccttagcctaccatgtgaaactctaccctgaagaaagggatggataggaagtagacctctttttcttaccagtctcctcccctactctgcccctaagctggctgt

SEQ ID NO: 1280 - DNA, 464 bp, Homo sapiens
actgtcactcagtctgtaaactacccccagagggtggtttgtttcctcattccttaaaaaaaaaacaaaaacaaataaacaaacaaaaaagaagtttactaaatttaaacactgacatcctgtgaagatgccagtctttacaggcgtttgtaaaagtagactgtggggagtatgttacactaatacaaagttttacaaatgaatacaagtgaaatatataaattacaatgaaatagaggaagattgtggctctgtcctgggttggttcttttagcagtcatattgctgttggtgagagcagcaaaagccacatatgcctccaagcactccatttattacttgaataagacacaagatgaattcaattccaccaagagccaagaggatagaaaacagagatacattccattccacaatgtgcttgggttcagtgcactcggaccatgtggaggtatccagaaggt

SEQ ID NO: 1281 - DNA, 273 bp, Homo sapiens
acagaaccgagatggattgggtgttgaagcacagtggtcccaacagtgccgacagcgccaacgatggcttcgtgcggcttcgaggactcccatttggatgcacaaaggaagaaattgttcagttcttctcagggttggaaattgtgccaaacgggatcacattgcctgtggaccccgaaggcaagattacaggggaagcgttcgtgcagtttgcctcgcaggagttagctgagaaggctctagggaaacacaaggagaggatagggcacaggt

SEQ ID NO: 1282 - DNA, 81 bp, Homo sapiens
acagatacgcatctactttttctggagccctctttcaagtctggcttatatcgtagttctgtatctaagaccccagaaagt

SEQ ID NO: 1283 - DNA, 435 bp, Homo sapiens
accaaataaatgaggtaaaaaggaagggtcatacaaagagggcactacaccagcttcttggcctcaaagaagctcttgaggtgacgcatctgccagatgccagtgaggatgaggatgacagtctgagcaatggaccaccataggaccctctggttggtgctctcgctcgtcagtcggaagcgctcttcacgatacctttggtaatcctgctccttctgaatctgttccacctgatcaagcaactggcgggcgcggagctgtagctccgtcagcttatcttttgcagcaatctcagggtagttgttggcatgctccccaacctggatgtcgagatgcacccgcagtttgccaccagcgaagagagccatcctggtagaattggagtgcagacagatttgatggtcaccgggcgtgtgggaggtgaacgtgaagcgg

SEQ ID NO: 1284 - DNA, 85 bp, Homo sapiens
  misc_feature 6, 7, 72: n = A,T,C or G
aagtgnntagaagccggcgtaaagagtgttttagatcaccccctccccaataaagctaaaactcacctgagntgtaaaaaactcc

SEQ ID NO: 1285 - DNA, 258 bp, Homo sapiens
  misc_feature 16, 17, 19, 36, 206: n = A,T,C or G
ccgggcaggtacagtnnanagatgtagatgcactanatatatctataaataaaatagtgctttaaggtaacaatattctttggctgacttaaatgcctgtggttgactcttagaaaagactaaaatgaaaatggccccactattattgtcaatcttaacacagagcttgtgcggaaggtccctatactgctgactgtcagcatctncaggtccacgatatgttctcttggtcctgataatgacttcacgagcacaagc

SEQ ID NO: 1286 - DNA, 267 bp, Homo sapiens
acacggcctcaagggatgtctcacatcctctgtctatttgagacttagaaaaatcctacaaggctggcagtgacagaactaagatgatcatctccagtttatagaccagaaccagagctcagagaggctagatgattgattaccaagtgccggactagcaagtgctggagtcgggactaacccaggtcccttgtcccaagttccactgctgcctcttgaatgcagggacaaatgccacacggctctcaccagtggctagtggtgggt

SEQ ID NO: 1287 - DNA, 378 bp, Homo sapiens; identical to SEQ ID NO: 348

SEQ ID NO: 1288 - DNA, 391 bp, Homo sapiens
actgtggcgctccgtgaaattagacgttatcagaagtccactgaacttctgattcgcaaacttcccttccagcgtctggtgcgagaaattgctcaggactttaaaacagatctgcgcttccagagcgcagctatcggtgctttgcaggaggcaagtgaggcctatctggttggcctttttgaagacaccaacctgtgtgctatccatgccaaacgtgtaacaattatgccaaaagacatccagctagcacgccgcatacgtggagaacgtgcttaagaatccactatgatgggaaacatttcattctcaaaaaaaaaaaaaaaaatttctcttcttcctgttattggtagttctgaacgttagatattttttttccatggggtcaaaaggt

SEQ ID NO: 1289 - DNA, 249 bp, Homo sapiens
acagctcatggataccacaggagatggcggccgctgggttttacttcactggggtaaaatctgggattcagtgcttctgctgtagcctaatcctctttggtgccggcctcacgagactccccatagaagaccacaagaggtttcatccagattgtgggttccttttgaacaaggatgttggtaacattgccaagtacgacataagggtgaagaatctgaagagcaggctgagaggaggtaaaatgaggt

SEQ ID NO: 1290 - DNA, 398 bp, Homo sapiens
acaggacacatcagctgagagcaaatcagtttttatgtttactcagcaccatcctcactaaaactattatttttgtcttattttcacccataaaaagtaatgtgggtcatactttattatttaatatgcatttacaaagatctaactattttagggattagcttttttaagcattcttaaagatgaaaaatacaaaaatgacttgtttttatgaattgacatgcttaagatcaactgaaaaaccaagattgagaggcttacaataaatcttttgtaaatgaaataaatggattgcagctgatttattgaaaagtcaatagatttttttgaaacagccaagatcactgaaaatattcagactctcctcacatctagtaagcgttaataaatacagttgt

SEQ ID NO: 1291 - DNA, 288 bp, Homo sapiens; identical to SEQ ID NO: 598

SEQ ID NO: 1292 - DNA, 294 bp, Homo sapiens
  misc_feature 108, 247, 274, 279: n = A,T,C or G
gtaccagcttccccatatgacctgtgaagacctcagcaacctggaatggctgagacaagaaacgctgtattttccgtgcacgggacacggtcaacttgtcttcctcanaaagttcatccatacccaggatggcaatgatatcctggagggatttgtagtcctgcaggatcttttgcaccccacgggcaacatcgtaatgctcactgccaacaatgttgggatccatgatacgagaggtggagtctanaggatccacagctggatagatgcccanctcancaatggcacgcgaca

SEQ ID NO: 1293 - DNA, 334 bp, Homo sapiens
  misc_feature 13, 15, 284: n = A,T,C or G
actcaatattatnanaacctcaaataattgacttgattttacacaacatccttcccttttctacaagttaatttttttacaaatcatttgggttatctcctaaataggttatattttattgcttctagaaacaatgtttcaaaatatatgtgcattatcagtaataatttgtataaatatttcccacaacaattttcataattttcaaagactaatttcttgactgaagatattttgctagggaagtgaaactttaaaattttgtagattttaaaaaatattgntgaatggtgtcatgcaaaggatttatatagtgtgctcccactaactgtgt

SEQ ID NO: 1294 - DNA, 263 bp, Homo sapiens
  misc_feature 14: n = A,T,C or G
actggaagatgtcnctgagtttgaaatcacaccagaaggaagaaggattactaaattagatcagattttgctaaatggaaataatataacaatgctggttcctggaggagaaggacctgaagtgtgaatgagtttccttgacttacactagattttgttttggcttataatgacaagaaaatggaattttttttcccactttctaatgtttaaatcccataaagctaagtttcccgttaaagggaagtgctttgaagatgtgt

SEQ ID NO: 1295 - DNA, 330 bp, Homo sapiens
acacagacacaaataaaataatattaaaaataaaaatcacacttgctttcaaggcagtggtcctggcactccacatacataatcaacttttcctttaaagaaattgcttggcccaaggagaccacagttagagaaccactaataaagctgtagcccgttgcctgcaacattttcaattcgggtttcaaaaatatataaataatttaattacaaaacccaacattttttttctcttttggcacagtgaagcatcggtcaatagcaagaaatcactgaagagcctctgacatgtctctcacactcagtcatacctggaaatgccacatacgt

SEQ ID NO: 1296 - DNA, 320 bp, Homo sapiens
  misc_feature 13: n = A,T,C or G
acaatgaaaccanactggcgggatggaagcagattattctgccatttttccaggtctttgagttgcacgtcaaatctggggctgatcaccccacacttgtttagcctgcctgtgaggttcacaacaattttcccagctctgtggtcatcaatgatttcaaattcgccaatgtaaccatgcttcatcatcacagtgagaaaccggacgatgactttggagcacggcctaataagcacctggcgtttgcctctcttttcggcattgttgatactcttgagagcatctgccaggacattcatgcgcaccattgtggcggcgcg

SEQ ID NO: 1297 - DNA, 598 bp, Homo sapiens
  misc_feature 549: n = A,T,C or G
gtcttaaggagctttccgacttcctccgagtccagcagtccctgggcaccaggaaggaactgcagaaggagctccaggagcgtctttctcaggaatgcccgatcaaggaggtggtgctttatgtcaaagaagaaatgaagaggaatgatcttccagaaacagcagtgattggtcttctgtggacatgtataatgaacgctgttgagtggaacaagaaggaagaacttgttgcagagcaggctctgaagcacctgaagcaatatgctcccctgctggccgtgttcagctcccaaggccagtcagagctgatcctcctccagaaggttcaggaatactgctacgacaacatccatttcatgaaagcctttcagaagattgtggttctcttttataaagctgatgttctgagcgaagaagcaatactgaaatggtataaggaagcacatgttgctaaaggcaaaagtgtttttcttgaccagatgaagaaatttgttgagtggttacaaaatgcagaagaagaatccgaatcggaaggtgaggaaaattaantggctcaacaggcacaatacctaggttaccacacaccactttttgattg

SEQ ID NO: 1298 - DNA, 397 bp, Homo sapiens
  misc_feature 11: n = A,T,C or G
acagcagaaanatgccaggcaatggtttgctgagctttctgtggatatggaaaagattttggaaataatcagggtttttttaaaactatatgagcagtggaagaatttcgatgagagaaaagagatggcaaccattcttagtaagatgccaaaaccaaaaccacctccaaacagtgaaggagagcagggtccaaatggaagtcagaactctagctacagccaatcttaaaacattccgaagaattccatagtggaccacttggaaataaaccattggacagatttcagtaatgtcttcagtggaacacaaatgaaaatgaatagcttgtttctgtcaagcatattggaaagtgattttatttttgcaaaataagtttttctttaatatgattctagt

SEQ ID NO: 1299 - DNA, 159 bp, Homo sapiens
actcatcgaacctgatgcgcccatcatgattggcatccaggttctggatgagcttatccgcagccttccggttccctgtgtccgacagcatgtggttcagctctttctggagcatctcgcggaagctgctcttgctgatcttgttcttgaccaggctgt

SEQ ID NO: 1300 - DNA, 549 bp, Homo sapiens
  misc_feature 14, 15, 17, 500, 527: n = A,T,C or G
agcgtgggcggggnngntgtacagggagaactcacagctccaagagcttccctccaaattatgatgaagttcctgtaaataactagatttcctacagcctggtcctctgcccatgggaaggaggggaaatggatgtgaaaagcaatgtggtctgccctcctgtcattcatagatccagttctgagcacagctcgtgtaatctaccagttcctcagggtgaaaccacaagccgatctccttctctgcactctccacagaatcactgccatgtataatgttcctgccaacttgtatgcagaagtctccacggatggtcccaggcttggagtctgcagggttggtctccccgagcatgactcggcccgtcttcaccacattcagcccctcccagaccatggcaactaccggccctgagtgcatgtatttcaccaaggccggcaaagaatggacggtccttcaggtcaacgtagtgttccttgagaagatcttcggaagcttgnatggaatttcagaccaacaaaggcggnatcctttctgctcaaaaacgct

SEQ ID NO: 1301 - DNA, 296 bp, Homo sapiens
actgcacgaagaggatcccgttcaccatcaccttgaaatctgagctctgcaccaggaaggattatatagctggccgggcacagtggctcatgcctgtaatcccagcactttgggagtccgaggcgggtggatcagttgaggtcaggagtttgagaccagcctggccaacatggcaaaaacccatctctactaaaaatacaaaaatttagccgggtgtggtggcgggctcctgtaaccccaactactcaggaggctgaggcaaaagaatcacttgaacccagaggcagaggttgcag

SEQ ID NO: 1302 - DNA, 580 bp, Homo sapiens
acagtggtattttttaatacaaaataaacatctgttttatggaaaaaactatacttcatatctacacagacagctcatcttttccaaacaatagccaaaattaaaattaactacaaaatctccaaaacaggggaaactgctttagattaaacgattccaggaaaaatggacccgtaacacattacaagggtgatctaaagattgtggctggaattactgttaaagtttttttttcccaatgcattaaattgtattttggggagatttttctcacttcggcatgatctcagatcatagatgagcaaactaacattaaaatatttacagttaacttgttgctctaaaaataaaactgtttgcctcaatttatttttaaaattcacttacgtatatggaatgtgcttttactcttcttaaaaaagcagctttcatatcacacccttgtttacagaaaagctacatgtgctgcatgctgactttgacacttaagtagcttcttggatcaaaatggcttctagatactaaatgccacttaattcagcactattcttggttggtctgtataagtaacactttaaaa

SEQ ID NO: 1303 - DNA, 364 bp, Homo sapiens
acggcggcgaagtgctaaaagggaacggcgatgaacaaatgtaattaataactttctctgcgaaagctttggaaaaatcttttttttttttggtcaagcttgaggctgaataaagcctttgatgcacaaaatgggactgctgaagagtggacagttggaccttactttggtgaccccatacatttgtggtcacatgctttagccatacacatggtaacattgactatggagtcttgtgaaagtgtaatgtgcgatggctatgtagacataaagaagaaacttgtaaatatcttttttctttttttaatgtttctgatttctgaagtgcttgtatagcttttatctgcggctttaaactgacagt

SEQ ID NO: 1304 - DNA, 632 bp, Homo sapiens
  misc_feature 482, 594: n = A,T,C or G
actatctgttcccctgtcctgtgaatggaagcaaagtgctggattgtccttggaggaaacttaagatgaatacatgcgtgtacctcactttacataagaaatgtattcctgaaaagctgcatttaaatcaagtcccaaattcattgacttaggggagttcagtatttaatgaaaccctatggagaatttatccctttacaatgtgaatagtcatctcctaatttgtttcttctgtctttatgtttttctataacctggattttttaaatcatattaaaattacagatgtgaaaataaagcagaagcaacctttttccctcttcccagaaaaccagtctgtgtttacagacagaagagaaggaagccatagtgtcacttccacacaattatttatttcatgtctttactggacctgaaatttaaactgcaatgccagtcctgcaggagtgctggcattaccctctgcagaacagtgaaaggtnttgcactacattatggaatcatgcaaaaggaaaaaaagtttcatgatatctgttgtttggcagttttttgtttatctctgacagttttttagttaaatgtttagatcctcanaaactacattagtgcctactattaacttactctgtctc

SEQ ID NO: 1305 - DNA, 260 bp, Homo sapiens
  misc_feature 12, 13, 26, 44, 45, 189, 216: n = A,T,C or G
ccaagaaagatnnaccgttagggttnggttgtttttgtttttgnnttttttttcttttgaaagggtttgttaatttttctaattttaccaaagtttgcagcctatacctcaataaaacagggatattttaaatcacatacctgcagacaaactgaagcaatgttatttttaaagggtttttttcacctncttattcttagattattaatgtattanggaagaatgagacaattttgtgtaggctttttctaaagtccagt

SEQ ID NO: 1306 - DNA, 483 bp, Homo sapiens
  misc_feature 9: n = A,T,C or G
aacaattcnaccgccatattataaaaactgaaccttgacccatagctaaactttatacaaacctttattcaaaaagtatcatagatataaatgtaaaacttaaaactataaaattcctggatgaaaataatatataatcttcatgacattgggttagacaagtgttcttacattgcacatcaaaagtaaaaaaattgataaagtgaattgtatcaaaattaaaatttttgctctaaaaaagtcagtgttcaaagaatgaaaagacaagtcacagactaggaaaatctatttccaaataatgtatctgacaaaggatttgtatcaatatattaaaaaacatataaaaacagtaagaaaaggaataatccaataaaaaggggagcaaaagatctgaacagacactttgcaagaatatatcatctttaactgtaagatcatcataaggtttgaggtgatatcctgatttgatcattatacaatgtt

SEQ ID NO: 1307 - DNA, 572 bp, Homo sapiens
  misc_feature 9, 19, 461, 497, 500, 502: n = A,T,C or G
cagcagccntggtggaacnaggaggtggagaattgagagcacgatgcatacacaggtgtttctgagtagtaattagatcgctgtgaaggaaaaagcacacctttgagttttcacctgtgaacactatagcgctgagagagacagtctgaaagcagaggaagacatcgatcagtaacaccaagagacaccaaagttgaaagttttgttttctttccctctgttttatttttcccccgtgtgtccctactatggtcagaaagcctgttgtgtccaccatctccaaaggaggttacctgcagggaaatgttaacgggaggctgccttccctgggcaacaaggagccacctgggcaggagaaagtgcagctgaagaggaaagtcactttactgaggggagtctccattatcattggcaccatcattggagcaggaatcttcatctctcctaagggcgtgctccanaacacgggcagcgtgggcatgtctctgaccatctgnacngngtgtggggtcctgtcactatttggagctttgtcttatgctgattgggaacaactataaagaatctggagg

SEQ ID NO: 1308 - DNA, 500 bp, Homo sapiens
actttgttatttttccatcactaaaggccaatcagaatttggaaccatgctgctacccaagaaatctaatggaatgaattagttctgtagatgacaatttcttcacccatttatgagacctaaatcttttccataacactcatgtattcagtataacaacatactaactgaaagagggacctgattgtttaaagtttgattgcagacactgtagaacataactcattatgtttcagataaggtaactcctagatatcaaactaatttgttggggtagagattttacaagtcatgccattagaagattttctctgatattatatgtgcagttcagttacaagatgaaatcatgtttttttaacaaaagagataaaatacaattgaagcaaaaaataacagctagtatataatatatacagtctgtatttgcttttcacagtaggcctgatgactaaaagatatgctttattacacgctattttcacctcttgaaagtcaaa

SEQ ID NO: 1309 - DNA, 357 bp, Homo sapiens
acagagcacatttgtcagtatttttgccggctggtgaattcaaacaacctgcccaaagattgatttgtgtgtttgtgtgtgtgtgtgtgtgtgtgtgtgtgtgtgagtggagttgaggtgtcagagaaaatgaattttttccagatttggggtataggtctcatctcttcaggttctcatgataccacctttactgtgcttatttttttaagaaaaaagtgttgatcaaccattcgacctataagaagccttaatttgcacagtgtgtgacttacagaaactgcatgaaaaatcatgggccagagcctcggccctagcattgcacttggcctcatgctggagggaggctgggcgggt

SEQ ID NO: 1310 - DNA, 271 bp, Homo sapiens
acaaaatgaggccaagacacccttgaagaagttcttgttgaagctggctgtttccagtaaattcaaagagcttcaaaagggtatcatcaggcatgatagtttctgggacaagctcatctttgcaaagatccaggacagcctgggcggaagggttcgtgtaattgtcactggagctgcccccatgtccacttcagtcatgacattcttccgggcagcaatgggatgtcaggtgtatgaagcttatggtcaaacagaatgcacaggtggctgt

SEQ ID NO: 1311 - DNA, 294 bp, Homo sapiens
  misc_feature 9, 11: n = A,T,C or G
acataaagntntattaatattctgattctcgtgtcatagcttttatggcaggaaaggatgaggacatgccccacctgtaacgtagagcaagcaaaccaccaagtagaatcttgagattctctctcaactgttctctagaaacacgcttgtgcttttaatctgccttttaaaagggacacagaacaaaaaatggttgtttgcaaataaacatctgaaagaaagtaacagctgacctgggctgaggcatccaaacaaagcagtcattgtggaaggagacaatgcaaaccacactgg

SEQ ID NO: 1312 - DNA, 125 bp, Homo sapiens
  misc_feature 11, 12, 92: n = A,T,C or G
ttttcccatanncaatcttccttccttaggtaatttggaagaaaactatgacccatttaatttctattgtgtttcacaaaattaagtgttgntcattatactctctgaaatataggtttaatttc

SEQ ID NO: 1313 - DNA, 415 bp, Homo sapiens
cagaagggcacactttcatctaatttggggtatcactgagctgaagacaaagagaagggggagaaaacctagcagaccaccatgtgctatgggaagtgtgcacgatgcatcggacattctctggtggggctcgccctcctgtgcatcgcggttaatattttgctttactttcccaatggggaaacaaagtatgcctccgaaaaccacctcagccgcttcgtgtggttcttttctggcatcgtaggaggtggcctgctgatgctcctgccagcatttgtcttcattgggctggaacaggatgactgctgtggctgctgtggccatgaaaactgtggcaaacgatgtgcgatgttttcttctgtattggctgctctcattggaattgcaggatctggctactgtgtcattgtggcag

SEQ ID NO: 1314 - DNA, 400 bp, Homo sapiens
acccaaatgaccagatttggtaatgaccatgggtctactcatgggggtttgagtgatctaagaaaacaatggatcaaggatggatgatgaatttggatatgaaaaaccaggaatagactgaaaaccctaacacaatgaaggggagtctgaacagtgaaattataagggaaaagcttgtattaatagaagaaaatgcaaataagattatgaactctgattccaatgtggaggctgtcttcctcatgctgtatatttacattctcacctctgtctggataatttctgatttatactagagtcagagccagtcattggtggtaacagtgaggctttaagactatctcataatttagattaattctaattttctgagaatgctcttctgtctataagtggaagt

SEQ ID NO: 1315 - DNA, 209 bp, Homo sapiens
  misc_feature 16: n = A,T,C or G
cacagaagcggtggangccaaacaggtggctcagcaggaagcagagagggccagatttgtggtggaaaaggctgagcaacagaaaaaggcggccatcatctctgctgagggcgactccaaggcagctgagctgattgccaactcactggccactgcaggggatggcctgatcgagctgcgcaagctggaagctgcagaggacatcgcgt

SEQ ID NO: 1316 - DNA, 536 bp, Homo sapiens
gttaactccctcaaaggtatacccttctgcacaattatttatcagtgtgagcctggctatgaactagaggggaacagggaacgtgtctgccaggagaacagacagtggagtggaggggtggcaatatgcaaagagaccaggtgtgaaactccacttgaatttctcaatgggaaagctgacattgaaaacaggacgactggacccaacgtggtatattcctgcaacagaggctacagtcttgaagggccatctgaggcacactgcacagaaaatggaacctggagccacccagtccctctctgcaaaccaaatccatgccctgttccttttgtgattcccgagaatgctctgctgtctgaaaaggagttttatgttgatcagaatgtgtccatcaaatgtagggaaggttttctgctgcagggccacggcatcattacctgcaaccccgacgagacgtggacacagacaagcgccaaatgtgaaaaaatctcatgtggtccaccagctcacgtagaaaatgcgattgctcgaggcgt

SEQ ID NO: 1317 - DNA, 249 bp, Homo sapiens
  misc_feature 11: n = A,T,C or G
accaatctagnctcataacaaaatgaggaaatctagccctcttgccccagagagatttaaatacagagagtcttagtttggactgaaagagaaaaattgctctgatctttctaaagcttgaacattaaggcttctttgcaattttcttagagctctttgatcgttaattatatctttccatcgaagagaagcagatttcttctgagatttctgaacagttcctgggtgtttccggttctgcttcagtgt

SEQ ID NO: 1318 - DNA, 328 bp, Homo sapiens
ctcatctgaggaggcctcgtctctgaacttgggttgtgccgagagagtttgttctgtgtttcccaccctctccctgacccaagtctttgcctctactcccttaacagtgttgaattcaactgaaggcgaggaatgttggtgatgaagctgagttcaggactcggtggaccctttgggaatgggtcatgaaagctgccatggggtgaggaaagaggagacagtgggagaggacaatgactattgcatcttcattgcaaaagcactggctcatccgccctacttcccatcccacacaaacccaattgtaaataacatatgacttctgagt

SEQ ID NO: 1319 - DNA, 479 bp, Homo sapiens
  misc_feature 8, 74, 75, 334: n = A,T,C or G
acaaaatngccggaatttagctaatagaaaaacatagtaaatatttacaaaaacgttgataacattactcaagnnacacacatataacaatgtagacaggtcttaacaaagtttacaaattgaaattatggagatttcccaaaatgaatctaatagctcattgctgagcatggttatcaatataacatttaagatcttggatcaaatgttgtccccgagtcttctgcaatccagtcctcttagaaattggtttctctctttgggagattcagactcagaggcagccagaggggacaggtcaagagctgaaataatcacataactactctaattntcttcattctattgactgtgtcaagttatagacacagccaaagtgttttttcttcggcctctgatgatttgagaagatgaagaacatgagcaattttctcattgcttaaaagaaaaacttggcacataagaggctgagtgtagta

SEQ ID NO: 1320 - DNA, 196 bp, Homo sapiens
accaatgggatgcagaaactcaaggatggattctcggttcctttttttatggctacatcatcacacagattcctggaggatatgttgccagcaaaataggggggaaaatgctgctaggatttgggatccttggcactgctgtcctcaccctgttcactcccattgctgcagatttaggagttggaccactcattgt

SEQ ID NO: 1321 - DNA, 403 bp, Homo sapiens
  misc_feature 285, 295, 296, 342, 344, 362, 385: n = A,T,C or G
acggatgctacttgtccaatgatggtaaaagggtagcttactggttgtcctccgattcaggttagaatgaggaggtctgcggctaggagtcaataaagtgattggcttagtgggcgaaatattatgctttgttgtttggatatatggaggatggggattattgctaggatgaggatggatagtaatagggcaaggacgcctcctagcttgttagggacggatcggagaattgtgtaggcgaataggaaatatcattcgggcttgatgtggggaggggtgtttaangggttggctnnggtataattgtctgggtttcgccttaagaggtctggtgagaatagngnttaatgtcatttaagganagaatgaagagaagtaagccganggcgtctttgattgtgta

SEQ ID NO: 1322 - DNA, 100 bp, Homo sapiens
  misc_feature 16, 17: n = A,T,C or G
acttcaactaccatgnnaaacacatccttatctgcataaattggaatatcatgaaatggagatatatattgtcctttctcatttttgaggaagactcggt

SEQ ID NO: 1323 - DNA, 295 bp, Homo sapiens
actgtttattaaccaaccagcttacaaaaataatcatggtagacaccttagttcattcttctaataagcctgttgatctggtcctcccggttgccagcatctccaccttctacaaaatgggtggtctttttcttcattccacctcgtggaggagacaatttgaagggccacaggaagttatttgcctctttgaagcgttttccaacagtatagatctcatgaatcaaatcctccatgcagatgatgccgtatttaccaagagatcgagcaatcaaagcgtttatctgtcaaagca

SEQ ID NO: 1324 - DNA, 435 bp, Homo sapiens
  misc_feature 387, 392, 400: n = A,T,C or G
actgacctgaaggagacctaagagtcctttccctttttgagtttgaatcatagccttgatgtggtctcttgttttatgtccttgttcctaatgtaaaagtgcttaactgcttcttggttgtattgggtagcattgggataagattttaactgggtattcttgaattgcttttacaataaaccaattttataatctttaaatttatcaactttttacatttgtgttattttcagtcagggcttcttagatctacttatggttgatggagcacattgatttggagtttcagatcttccaaagcactatttgttgtaataacttttctaaatgtagtgcctttaaaggaaaaatgaacacagggaagtgactttgctacaaaataatgtngctgngttaagtnttcatattaaatacatgccttctatatggaacatg

SEQ ID NO: 1325 - DNA, 293 bp, Homo sapiens
  misc_feature 34: n = A,T,C or G
acatgctagaagtctgctgttgttggtaacacanaaacatacacagtcttcatattcaaagtcttcacggggatgtcttctgtaatttcctgcgtttgggtctcattcagaaacagctttagcttcctgctccgaaggccaaacaccttggctgcttcatacagaagaccttggtgggtgagtccattctgcccaagtgggttttcaagcaggagagtgcccactgtccccattaaacactcttgtggctctgcattcaggagctgtaggttgatatactgacaaagaagagt

SEQ ID NO: 1326 - DNA, 529 bp, Homo sapiens
  misc_feature 15, 17, 24, 34, 38, 149, 185, 199, 207, 217, 224, 247, 321,332, 353, 355, 369, 423, 430, 443, 451, 454, 468, 470, 500,504, 517: n = A,T,C or G
caagctttttttccncnttttttntttttttttngagncaaaaatatatttactggaatgtttttagttatacctgagggcaacaacatttacaacatttagcttttgttacacctataaatgtggaaattgcttgcaaaacaactgtnatatgaaaggaactatatttctgcaaatattgacanaatggttatgcatntctttcancatataattnggtactntacacaggcttcctgacccccancatgacccgctccctaatgcaataatgcaagtccttatgccattaaaatattaatatgaaatattataatcagngtttatatacncaaataatgaactggcaagtntntagtttcaaattanatccttgaaatatggaaaaatagaggctagttctctttgccttaaacataattnttaaaanaacattttgttanaaaggganaanataattggacattntnaacgttccaatttgaagtgatacttgcctnttantttcttgaaaaanaagttttgaaag

SEQ ID NO: 1327 - DNA, 507 bp, Homo sapiens
  misc_feature 12: n = A,T,C or G
gctgtatgattncgttttgaattttgtttttattttcaagagggcaagtggatgggaatttgtcagcgttctaccaggcaaattcactgtttcactgaaatgtttggattctcttagctactgtatgcaaagtccgattatattggtgcgtttttacagttagggttttgcaataacttctatattttaatagaaataaattcctaaactcccttccctctctcccatttcaggaatttaaaattaagtagaacaaaaaacccagcgcacctgttagagtcgtcactctctattgtcatggggatcaattttcattaaacttgaagcagtcgtggctttggcagtgttttggttcagacacctgttcacagaaagagcatgatgggaaaatatttcctgacttgagtgttcctttttaaatgtgaatttttatttctttttaattattttaaaaatatttaaacctttttcttgatcttaaaagatcgtgtagattggggttgggga

SEQ ID NO: 1328 - DNA, 306 bp, Homo sapiens
acctgagatcctggtgcacaacatagtgatcttcatgcgaacttcagtgaagatttcatacattggcctcatgacccagagctccttggagacacatcactatgtggattgtggaggaaattccacagctatttaacaactgctattggttcttccacacagcgcctgtagaagagagcacagcatatgttcccaaggcctgagttctggacctacccccacgtggtgtaagcagaggaggaattggttcacttaactcccagcaaacatcctcctgccacttaggaggaaacacctccctatggt

SEQ ID NO: 1329 - DNA, 568 bp, Homo sapiens
acagtctgtttcctccttcacccccagaacaaaaatcgaacttctggttggacagcgtcagatgtcactgaggtgaccccagcctgtttgcagttccaagtcttccgtgtaggcgtcactgctactggaactttgtagatgaggagcctgtatgatgatgtcctgaacatttctatcctttcctcacacagagggaagctactgggaatatcagagacaagctattattaaacaagtgtctctagtccaagacatctcctgtggcagggaaatgagggggcaggctgtatcagtgatatttttataaactctggttttagaaaaaattcttcagatggacgcattattttaagactttaacattttccaaaaccaactgaatcttatcccctccatttatccccctccagacacttctaatcaaggtcaccatctccaacttcccccatagacaataaaaatatggctggagaattctactgtaatagaaaaccaaggagatatagtaatttgacagtgtgtttcctttccatccactagacaagaataccccctcccattctttcct

SEQ ID NO: 1330 - DNA, 231 bp, Homo sapiens
  misc_feature 10, 215, 223: n = A,T,C or G
actgaggcanctccaacctcaccgtgtagtttgttcccttctcaaagcacaccggccgaggaaggacgacatatcttgagcctggtgataatgacaccacctggttgtcatcatcggggatggtattaccacatcggctgctggttggaatccttccaggtcgctgcactgtgatgacagctttttcccagtggtcgggtagctgtggctcgtancgaattangatgtcgt

SEQ ID NO: 1331 - DNA, 554 bp, Homo sapiens
ccgcatcctagccgccgactcacacaaggcaggtgggtgaggaaatccagagttgccatggagaaaattccagtgtcagcattcttgctccttgtggccctctcctacactctggccagagataccacagtcaaacctggagccaaaaaggacacaaaggactctcgacccaaactgccccagaccctctccagaggttggggtgaccaactcatctggactcagacatatgaagaagctctatataaatccaagacaagcaacaaacccttgatgattattcatcacttggatgagtgcccacacagtcaagctttaaagaaagtgtttgctgaaaataaagaaatccagaaattggcagagcagtttgtcctcctcaatctggtttatgaaacaactgacaaacacctttctcctgatggccagtatgtccccaggattatgtttgttgacccatctctgacagttagagccgatatcactggaagatattcaaatcgtctctatgcttacgaacctgcagatacagctctgttgcttgacaacatgaagaa

SEQ ID NO: 1332 - DNA, 472 bp, Homo sapiens
  misc_feature 21, 403: n = A,T,C or G
acaaggcatttctgacatttnataaacctacatttaaggggaatttttaaaggaaatgttttttcttttttttttgtttttcgagggggcaaggagggacagaaaagtaacctcttcttaagtggaatattctaataagctaccttttgtaagtgccatgtttattatctaatcattccaagttttgcattgatatctgactgccactcctttctttcaaggacagtgttttttgtagtaaaatcactggtttatacaaagctttatttagggggtaaagttaagctgctaaaaccccatgttggctgctgctgttgagatactgtgctttgggagtaaaaaaagaaagttatttctttgtcttaaagaatttttaaaaaattagtcatgagacttattcatntttccagggaacatactgattggtcttaaaagactagacagttaagtaaaaggtggctggaacatctat

SEQ ID NO: 1333 - DNA, 495 bp, Homo sapiens
  misc_feature 16: n = A,T,C or G
accctcatcattgctnttctagccattcatgccccctcttcctctggcacattttctaagagtttatttcataagcagcaaacggactgttgtcgatttcatctctcctgacctacctggtggaggtgctaatggccatggacagaaaggggcgagccagagctcgtggctttgtggaggcagaggcctgcattcagcagcggccctgtgtgcctgtaagttaggaaggctttctgacaggtaagaaaatgagataggttgatgacttaccatgcttttatatttggcagtttacaattctagacttttcctactatggcgatctttttttacttaattctttggaggtaacaatattttggagtcttaagaatttgattttataccaataagaaataaaaattagggatctttcctgtagtatatagttttactattttaaagagatctctgaattttactagagaaccaacattccttaatggcagaactttg

SEQ ID NO: 1334 - DNA, 239 bp, Homo sapiens
actaattatggggggagcaggtgaagtagctgttgggaaagaaggtgtatttgctgtggtgctagcagtttcagggaaattagtttcagtggtatcagctgcagctactgtaggaccactagtcgcagtttctgtggttgctacagcatcagctgagttgccttggttggtggctgtgtttacagaaaggagagcaagaagagtaagatgaatgatggctttcattttagctgttcttg

SEQ ID NO: 1335 - DNA, 457 bp, Homo sapiens
  misc_feature 17, 19, 140: n = A,T,C or G
actttaatatttatgcngntgttttcttgtttcttttttactcactgcagtatgaggaacaaatcacaaacacttactttggagaaacagagaccgtagtgtagattttacaaaatcactttttaaaatctctgtattgngctcctcaaatacctagagccagtctttgcataaaatatcacagctttatctataaccttaaaattctgcagcagcctaaagatatggataagatataccaccacttgctattctgaaatatatctattaccatatccaacctaatgatagtatctaaaaaattctttcttccataggaagtctctgacaagctgttattcatttccttgacgttaaaagaatctggggccaacatttgtattttatcagaaaaaaataaaaaaaaagtttacctaccatgttcatattaagaacaatgtctatacaagtcagttgt

SEQ ID NO: 1336 - DNA, 387 bp, Homo sapiens
  misc_feature 13, 14: n = A,T,C or G
actcacaagtaannaactttctctactgaaggatactgtcacagagtttgttgcagagcatctatatatatatttatttatttattttaaaaaataaacaacaatgatgaacgaacccaggttcctagaaccaattctcttgattctctacttccacaaaataaagtgtatcatttggccaagactacagatgtgtttttttttttcacagatgcaagtgccatgcaaaaataaattaaagaacagataccaaaacatacatgtgataaaactacagaaggtagatttttaaaagcatttatataaacataatttataatacttctcttttttcctttatatacagtcacaaagctgtagttatacatctaggatttcctctgctgt

SEQ ID NO: 1337 - DNA, 390 bp, Homo sapiens
acctgacatcttttcctgcattctctaccaggaaataaagatgaaattaaatatcaaaattctaatcgatgatatcagtgcaatgttcaggaactattcattaagatattagaaaaccattcaaagtggtaggacatcagagcctacttcttacattgctgtgggagaaatgcaggtttcaaatttaatatatatatataatttttttaaaagcagaagtttctttttatatttggtaaacttaagttccataaagccagacgctatacagtgcaaaggctaatgtggcaatagctctaaagacacagttgctgctcaggttttatgtatagataatagaaagcacagtttactaacacagtaaaccaacagagttcaagtcagatgagt

SEQ ID NO: 1338 - DNA, 363 bp, Homo sapiens
acagatctttaatagaaaagtatatctctttacagtagaaaaatatctgaacagtcaacttttcttaagacaaaaattcaaatgtaacatactacctaaactataaatttagctaaaactgaatcgagctgtttataagaactgattccaaaatatacatatatgaatttacataaccgatatgtagaagctcttcaaaatcgactgtaaattgaaaagttaaaattggccttgcctctgcagtttggagctgcaatggctgccagtatcggctgttttcttggtgcctgagctgcagggtgggcctgtcgaggaggggctgctgtctgggtcgctttccctctggctgtctgtggcgtaggt

SEQ ID NO: 1339 - DNA, 278 bp, Homo sapiens
acttgctggtctcaaatttccacaaggagatatcaatggtgataccacgttcacgctcagctttcagtttatccaagacccaggcatacttgaaggagccctttcccatctcagcagcctccttctcaaatttttcaatggttcttttgtcgatgccaccgcatttatagatcagatggccagtagtggtggacttgcccgaatctacgtgtccaatgacgacaatgttgatatgagtcttttcctttcccattttggcttttaggggtagttttcac

SEQ ID NO: 1340 - DNA, 333 bp, Homo sapiens
  misc_feature 8, 11, 187: n = A,T,C or G
aaagaggntgnatcaagtttaaatgactgtgctgcccctttcacatcaaagaactactgacaacgaaggccgcgcctgcctttcccatctgtctatctatctggctggcagggaaggaaagaacttgcatgttggtgaaggaagaagtggggtggaagaagtggggtgggacgacagtgaaatctanagtaaaaccaagctggcccaaggtgtcctgcaggctgtaatgcagtttaatcagagtgccattttttttttgttcaaatgattttaattattggaatgcacaatttttttaatatgcaaataaaaagtttaaaaagttaaaaaaaa

SEQ ID NO: 1341 - DNA, 387 bp, Homo sapiens
  misc_feature 13, 30, 68: n = A,T,C or G
accctctgtcaanagaggagatgttgcctncaacagcagggaggaatgagacctgggtggcttcccanaagtcagtgtttccggcatgactggctcctttcctggcaaacactacaatgtgtcacactacagctagcaattcctccccactccctcccagcccttcctccctccaccccacaaccctatagccatttgaggcaaatggctttctaaaggcccagggatagatgtgccaggcttgcctcttaatggggtcaaagtgagttttgctttggaaaaattcaaacaggaatgtaaaatggtttgagctctttctagtccaaccaaaggtgattacatccagcccctctcaagggaatgggggcagagactgtcgctcctgaa

SEQ ID NO: 1342 - DNA, 241 bp, Homo sapiens
actgtgccttgacctcagcaatgatgctgtccatgtccagggagcggctgttgtccatggacagcaccacagatgtgtccgagatctgggactgcagctcccggatctcctcttcatacagctgcctgaggaagttgatctcgtcggtcagcccttccaggcgagactccagctctaccttgttcatgtaagcttcatccacatccttcttgatgaggacaaattcgttctccatctctgt

SEQ ID NO: 1343 - DNA, 347 bp, Homo sapiens
  misc_feature 14, 17, 195, 196: n = A,T,C or G
accgcaagggtggnttngatgaagtctgactactttttttcaaacaaactattatattaaaactgtcatattttggctaagtttggacctataactacactttcattgtttgcatctctctatgaagatacgtctgtccaaacttttaaaaggcataactgtattttatgtgtttattctttatatagatagtannttatattttattctcacccgaagtattcacacaatcttttttaaaaaaaatttgaaatggcattttgtattgccacagaggtaggatgagccatatattagtgaaatgttttattttgtaaaatataaatggattatttgccatcattagt

SEQ ID NO: 1344 - DNA, 186 bp, Homo sapiens
  misc_feature 13, 16: n = A,T,C or G
actgaaggatttntcntctgttcacacgcaggcgttcaagctcaaaagcctaacccctagcactcccacataactgctgaaccctgcacatgggaacagtccagtgtgtccccaagatgtggccgcagacctagacagctgcagtcctctactgctatctgaaggttcctgacagctctgcatagt

SEQ ID NO: 1345 - DNA, 110 bp, Homo sapiens
  misc_feature 15, 52: n = A,T,C or G
gcaatcccggctttncccattcagccagggggatgcggcggccataggtcangaggctgcgtccgatgtcctcacacacaggagtagtgccatctagatgagataccagg

SEQ ID NO: 1346 - DNA, 414 bp, Homo sapiens
  misc_feature 13, 14, 16, 26, 32, 213, 214, 346, 355, 375, 376, 392: n = A,T,C or G
tactgcatctacnncnaccgcaaaanacgaantgaccccaacttcaagaacaggcttcgagaacgaagaaagaaacagaagcttgccaaggagagagctgggctttccaagttacctgaccttaaagatgctgaagctgttcagaagttcttccttgaagaaatacagcttggtgaagagttactagctcaaggtgaatatgagaagggcgtnnaccatctgacaaatgcaattgctgtgtgtggacagccacagcagttactgcaggtcttacagcaaactcttccaccaccagtgttccagatgcttctgactaagctcccaacaattagtcatgagaattgtnagtgctcanagcttggctgaagatgatgnngaatgagaaacaaatntcaacataataaaatctcagtt

SEQ ID NO: 1347 - DNA, 324 bp, Homo sapiens; identical to SEQ ID NO: 613

SEQ ID NO: 1348 - DNA, 433 bp, Homo sapiens
  misc_feature 15, 127: n = A,T,C or G
ccaatattggggcanatctaaaaggcagaagttgatgaagagaagcctcattaccccctagatgcattttgtatatgcttcatgttatataaattctccagtggtgtttgagagaaaatggctaagnagcattaccataaattgaaaataaatttttagtatttttacatccatcaaaggcaaatcatctctttcagtgttttcttattgtctgatcactaaataattcctgcctttggtccctagaccaaagagcttcacacattccaaagagaagctggatattgacatttataaccacagacaaatggatagggaaatagcttgggaaaacaagaaggatgaagatggcagcatttataatttcaggggaaccgtccatagatcacatattaagcattttgtagagtctctaccatgtgttcggaaatgt

SEQ ID NO: 1349 - DNA, 415 bp, Homo sapiens
acatgcagatgacttgagagaaggtgcacagtatttgatgcaggctgctggtcttggtcgtatgaagccaaacacacttgtccttggatttaagaaagattggttgcaagcagatatgagggatgtggatatgtatataaacttatttcatgatgcttttgacatacaatatggagtagtggttattcgcctaaaagaaggtctggatatatctcatcttcaaggacaagaagaattattgtcatcacaagagaaatctcctggcaccaaggatgtggtagtaagtgtggaatatagtaaaaagtccgatttagatacttccaaaccactcagtgaaaaaccaattacacacaaagaatccaaaggccctattgtgcctttaaatgtagctgaccaaaagcttcttgaagctagt

SEQ ID NO: 1350 - DNA, 202 bp, Homo sapiens
  misc_feature 10: n = A,T,C or G
ctgcaattgnaacaacagaaaaatgctggcaccagaacgaatgagggtcctctcatcgttactgaagagcttcactcccttagttttgaaacccaattgtgccagcctggtttggtaattgacctcgagacgacctctctgcccgttgtggtgatctccaacgtcagccagctcccgagcggttgggcctccatcctttggt

SEQ ID NO: 1351 - DNA, 232 bp, Homo sapiens
  misc_feature 12, 14: n = A,T,C or G
accagcaactcncnaggtttctgccagcccactgttgtatacgcttattgagaaaacaatgcaaaatgtgaagcatccggttactgggcaatttctatatcaggacagcaactgggccagcaaagttgagaaactcactttagacaatgctgctttccctttccttgcatattctggaatcccagcagtttctttctgtttttgcgaggacacagattatccttatttgggt

SEQ ID NO: 1352 - DNA, 343 bp, Homo sapiens
  misc_feature 14, 15: n = A,T,C or G
acaaccagaaaatnntgtgggatattgaattatgggaggctctgactgtctcgggtgtcagcttaacattccacagatggggggttagtttttatatcctataatacaaagcatattaaatggcaatatggagtcagtcctgcatttaatgtcttgaacattttaaattacttctattaccatgttgttttttagtagaattgtttcctaaagaaaaccactctttgatcatggctctctctgccagaattgtgtgcactctgtaacatctttgtggtagtcctgttttcctaataactttgttactgtgctgtgaaagattacagatttgaacatgtagtgt

SEQ ID NO: 1353 - DNA, 579 bp, Homo sapiens
  misc_feature 544, 548, 549: n = A,T,C or G
acaaagataaatgtttcttcacaaaacggccaaatcagtaacacaggctttgtgttcaaagtattgattagtgcatacttcactaataaagaatctatagtatgtattttattagtattctagaaaatttcagacaatcagcaaatggaatgaattttattatcaatatgccatagaaattcagtcatctaatttttctagcttatgttatgttgagcctgcatgtggtctctctacctggaggagggacaggataagaccagcagtatcccatatgattccaaatggaagtccaataatgtattggaatttgctacatctcatatccaaacagtgctttatctacattaatggatgagtttgtgattttaatatggaaacaaatgagtgattcgagttgttcaaaatataatttttgaatatacttttgtgattgatagttatgcctcaatcactatgaaactcagagtattattaaaaagaaccttcccctctttcttagcactaaattcaggctcttgtagatctttcccaagctctgctntgannatcaggtggtgctgtggcattaaagttgca

SEQ ID NO: 1354 - DNA, 358 bp, Homo sapiens
  misc_feature 16: n = A,T,C or G
acctagaatatcaacngagtcttttaaatgaaagtgatggaaaatcaagatggttctactcaccgtggttgttggtagaatgttacatgtatcgaagaattcatgaagcaattatccagagtccaccaatcgattactttgatgtatttaaagaatcaaaagagcaaaatttctatgggtcacaggaatccatcattgctttatgtactcacctgcaacaattgataagaactattgaagacctagatgaaaatcagctgaaagatgagttttttaaacttctgcagatttcactgtggggaaataagtgtgatctgtctctctcaggtggagaaagtagttctcagaataccaatgt

SEQ ID NO: 1355 - DNA, 303 bp, Homo sapiens
accaggagctgctacagagcgccagcgcaagcccaatggacattgcagtgcaggagggaaggctgacatggctggtttacattattggagcagtgatcggtggccgggtttcttttgccagcactgatgagcaagacgccatggatggtgagcttgtctgtcgggtgctccagctgatgaacctaacagattctcgtttggcccaggcgggtaatgagaagctagagttggccatgctgagcttttttgaacagtttcgtaagatctacattggggaccaagtgcagaaatcctctaagctgt

SEQ ID NO: 1356 - DNA, 394 bp, Homo sapiens
  misc_feature 12, 14, 15: n = A,T,C or G
acgtgtggtcangnngaagtctgttctgaaggtgctgggagaatatcctctcattgtctgtaaacgctcccttcatctcattaaagacgactcctttaaagaccaagggcgtctgggggtcgctcggattctcatgttccagccgccatccttcctgccagaaatccagctcgcgtaaacatgggaaaaaggtggcatccaaatacaccgagaggagattctgaaagtccttgggattttgtgtggaaaatggatacagagtataatcactagctgtgaaggcgttcatgaacgtggagagggaccggctcaacattttgaagaaagggtctctgcacggatatttctgagacccacaaaggacggtatgctcaagaatgtgaggaacaccagt

SEQ ID NO: 1357 - DNA, 311 bp, Homo sapiens
  misc_feature 12, 13: n = A,T,C or G
gtggtggcgcgnncctgtaatcccagctactctggaggctgggatgggagaatcactggaacctgggaggctgaggctccagtgagccgagattgcatcactgcactgcactccagcctgggtgacagagggagaccctgtctccaaaaaaaaaaaaaaacaagcttttacaaatgttattagtgtccttttttatttctaatgccttgtcctcttaaaagttattttatttgttattattatttgttcttgactgttaattgtgaatggtaatgcaataaagtgcctttgttagatggtgaaaaaaaaaa

SEQ ID NO: 1358 - DNA, 595 bp, Homo sapiens
acttgatgataacggttttaaaatccttcactcgttctttctcaaatcttcccacttcttttcgaatcgttttagatatctgttcaaaatctctttccccttgttgcactttcgcctcccactctcttatttcatttttagcttgctgtattttatctggtttgttagcaaccatcatttttgcttcagcttcacgttttttgagcaaagtaatttgagcatcttcccatttctgccagcacttcattcgatggtcaaacacacctttcactgcagcaataagacgaatgtagtcactaagtagttctgaaaacatataaaagtcagcaaaagcttgttcttgatgtaactggtctatcttctcctcaacctctgcaagctgagacaaagctctagataaagcagtatgatcctcagaattacctaacatggcagcacttttagcaaaggcagctgtgttggctgaaagttctgaaatttaaaaaaaagtatgcaattttagtgttcactcataaaattttaaaatattgtattgatttttccacttttctctaaattttacttatgcacaagttgctcaaataatattttaaat

SEQ ID NO: 1359 - DNA, 391 bp, Homo sapiens
accctgtgccagaaaattggctccacaaggaggctcaccagctcttcttggaacctgaggtgctggacccagagtctgtggagctgaagtggagcgagccaaatgaagaagagctgatcaagttcatgtgtggtgaaaagcagttctctgaggagcgaatccgcagtggggtcaagaggctgagtaagagccgccaaggcagcacccagggccgcctggatgatttcttcaaggtgaccggctcactctcttcagctaagcgcaaggagccagaacccaagggatccactaagaagaaggcaaagactggggcagcagggaagtttaaaaggggaaaataaatgtgtttccccattatacctccttcaccccagaatatttgccgtcttgt

SEQ ID NO: 1360 - DNA, 257 bp, Homo sapiens
  misc_feature 10, 151: n = A,T,C or G
actatagggnaaatacgggccctatttcaaagatttttaggggaattaattctaggacgatgggcatgaaactgtggtttgctccacagatttcagagcattgaccgtagtatacccccggtcgtgtagcggtgaaagtggtttggtttanacgtccgggaattgcatctgtttttaagcctaatgtggggacagctcatgagtgcaagacgtcttgtgatgtaattattatacgaatgggggcttcaatcgggagt

SEQ ID NO: 1361 - DNA, 274 bp, Homo sapiens
  misc_feature 10, 11, 22, 24, 72, 181, 182, 228, 229, 244, 245: n = A,T,C or G
catgggttcnntccatttttgntntttgtgtttttaattaaaagaaaggttacctcagttttcactccttanacatggatgtagctacctttttttgtatgtcttttttttttaagcaatcgtgttgaattaggagtatacttggtgtggaaagagtatgaatttgccatgtgatttgcanntggggggaagctactgtgagcgtgtgtttttttaatttacactatnnagtgatttttttttnncccaacgtcaagttttttaccttgcatgt

SEQ ID NO: 1362 - DNA, 334 bp, Homo sapiens
  misc_feature 10, 13: n = A,T,C or G
actcaatatnatncaaacctcaaataattgacttgattttacacaacatccttcccttttctacaagttaatttttttacaaatcatttgggttatctcctaaataggttatattttattgcttctagaaacaatgtttcaaaatatatgtgcattatcagtaataatttgtataaatatttcccacaacaattttcataattttcaaagactaatttcttgactgaagatattttgctagggaagtgaaactttaaaattttgtagattttaaaaaatattgttgaatggtgtcatgcaaaggatttatatagtgtgctcccactaactgtgt

SEQ ID NO: 1363 - DNA, 585 bp, Homo sapiens
acacttgaaaccaaatttctaaaacttgtttttcttaaaaaatagttgttgtaacattaaaccataacctaatcagtgtgttcactatgcttccacactagccagtcttctcacacttcttctggtttcaagtctcaaggcctgacagacagaagggcttggagattttttttctttacaattcagtcttcagcaacttgagagctttcttcatgttgtcaagcaacagagctgtatctgcaggttcgtaagcatagagacgatttgaatatcttccagtgatatcggctctaactgtcagagatgggtcaacaaacataatcctggggacatactggccatcaggagaagggtgtttgtcagttgtttcataaaccagattgaggaggacaaactgctctgccaatttctggatttctttattttcagcaaacactttctttaaagcttgactgtgtgggcactcatccaagtgatgaataatcatcaagagtttgttgcttgtcttggatttatacagagcttcttcatatgtctgagtccagatgagttggtcaccccaacctctggagagggtctggggca

SEQ ID NO: 1364 - DNA, 138 bp, Homo sapiens
  misc_feature 15, 26, 44, 45, 76, 77, 96, 97, 127: n = A,T,C or G
caaaaagctgcattngaggatagcantggcagctccgagttacnngaaattatgagaagacgacaggaaaaaatcnntgctgccgctagtgattcnngagtggaatcttttgatgaaggaagcagtnactaatttgtt

SEQ ID NO: 1365 - DNA, 270 bp, Homo sapiens
  misc_feature 16, 238, 255: n = A,T,C or G
actctctctgaaacanctacaaacatcttgtttttgcaaaatatacaatgtttctcaatctttctgtccttatctcaatttgcaaaaatattttgaaacaatctcctttaaatgttattcttgttaatgagggcaaatcttttaaaatccacatgctagatcttgaaaacgcttgagaagaaaataaactgtgaaaggagtggttatttaaatacttcaaactgcacatgtgaaacanacccactatttaatcanaattctatgcaagtt

SEQ ID NO: 1366 - DNA, 182 bp, Homo sapiens
  misc_feature 14, 15: n = A,T,C or G
acttaaattctttnngatatatgctttaggtgatgggtgttcacaatgcaaaaatcctctttgctctactaaaaaatttcccaaaggattaattcacagggtgaaaatagtggtggatctgaaaaaattagctacaagttaaagttcttgtggagctagcaatcactccaacccacactaag

SEQ ID NO: 1367 - DNA, 187 bp, Homo sapiens
  misc_feature 17: n = A,T,C or G
actcaaccatcttaggncatcagattggactttcaggcagggaagcccacgaggagataaacatcaccttcaccctgcctacagcgtggagctcagatgactgcgccctccacggtcactgtgagcaggtggtattcacagcctgcatgaccctcacggccagccctggggtgttccccgtcactgt

SEQ ID NO: 1368 - DNA, 160 bp, Homo sapiens
  misc_feature 12, 27, 99: n = A,T,C or G
actaggattacnggcacaagccactgnacccagcctaaatctcttaaccaattacctcctccactaccatctcattctatgaggccagcactccctganactaaagccaaagacacctattaaaaacccaaagcttacagaccaatatcatatcccttat

SEQ ID NO: 1369 - DNA, 416 bp, Homo sapiens
acttctacacaaggcctcttagtgacgtcaatcaattggaggtaggagtttatcaatgaattgcttgacatccatcatttcctgttgacacgaactgtgcatcataccttcataggttttaaaggtcacattggctggattcaccaatgtttttagtttttccaccgtaagagaaccaaacatcaggggaaccaaagggtcacaatccccgtggcactggagaatagaaatatctctattagcaccaccgataggaccctgtggaaaggaagcccgaagtggaagccagcaactgagtgcagtgacacctgccagtttctgctgtgtggtaagggcagtatataaagataaagctcctccctgagaaaaccctcccaaaataattctgttagaaggaatgccattcttcacttctt

SEQ ID NO: 1370 - DNA, 553 bp, Homo sapiens
  misc_feature 256, 470, 494, 502, 506, 530: n = A,T,C or G
agtttgagttcttctttgtggaaacttaagatgtggtgtaaatgattctttccaaaattgtccagcagcttgaatgaggcagtgacaattctgaggtggtttattgggagtccttctacatttctcttagataactctgcactctgggtggctattgtgtagccttactgccccagagtgcctgttagccaaatatttcccctctgataggaatattttctaagaatcagctgataacttgcgtgctggaccttgntatctgtgcccctgggagacacacgttttcttggttttgaaaacctgaaacacaggcaactttacattttggggaattagctgatgcctcctgaagcctgaggaggtggcggggaatatgagcggtgctgtctctctcaaaagtgccctttagatgattccccctcctagggctgcctgcaggggctgtaggcttgggaaagattgtgtaggtnacagtgaatcagaatgaagtggtngattttgngtangatgcatttgtctgctgtaatttnttatatatatattaaacttactg

SEQ ID NO: 1371 - DNA, 292 bp, Homo sapiens
  misc_feature 13, 14, 208, 218: n = A,T,C or G
acacagcaggtcnntcagtgccttatagaggaggccgttcagggccctcaggcgcgcatggtcttccttcctggttttctttgaggtgctcctcatgaggaattccaacttggatggtttgtaagtcgagtgagaacccaaggaaggactttcataccaaaccttttttttggttttcgaggcaaatttcttgagccagttcttgcangagacagcanagcagtgaagtccccgctcgcagcctggaaatagcgcagcatcgcggctacggaacagggcccggagacccgcg

SEQ ID NO: 1372 - DNA, 133 bp, Homo sapiens
  misc_feature 15, 16: n = A,T,C or G
gaaagggagccagannactgattggagggccctatcttgtgagtggggcatctgttggactttccacctggtcatatactctgcagctgttagaatgtgcaagcacttggggacagcatgagcttgctgttgt

SEQ ID NO: 1373 - DNA, 441 bp, Homo sapiens
  misc_feature 18, 342, 343, 412, 432: n = A,T,C or G
acctattaggaaaaccanatattgcaaatggtcaattcgattttaatttctcaaaagatactctgttatccagaagattaaaatgcctacattgagtgcttaaaaaaaaaaacaactgtgatgatgtgagcagaatggcaagtaagttaagcatttttgatcctgtaatcatggtatcattacaatgaaaggaattcacaaactactgccagaggaagtttgtttttttaatttaagagggaaatataacctataaatttgtttcttccaagcttagctcttaaatttggagactcaaagttaaacatcctcaacagagttttatttataattttgaattgnnaatttgtattttgctactgatctgtgatcaaccattttaacttttcatctctagggatgtttaacattnataattgcaaaataaaccanctataaaaa

SEQ ID NO: 1374 - DNA, 375 bp, Homo sapiens
accaatcaggttgctgtgagaaaactgacaaaatatgcaataaagaataccaagagagaaaggacaatcgccaattcagtttcccagaacagaatttttatgaactgcacaaatgtttaatgtaaatggtgatacctacagggaagaaatagaagagttgataatatatcactgggacggggtgggggaaagacttgaaatttttggtgcctaacactaatggtccatatgtagttaaacccatgagtatggtatatgaatgtcttttttaaatgttaaaatgtgttgtctatttaatgttaattaaaatgcagatcaaagcaccaccatttgctttttccacagatcattaacatttccttaaagtatgtaagt

SEQ ID NO: 1375 - DNA, 532 bp, Homo sapiens
  misc_feature 526: n = A,T,C or G
actgagaacaatttaactctgaacacaaaagtttagtgaatttgctactgttccattacaggacaattaaaaatgagactatatcaacttcactagaatttaattgctaaagctaccttatgcacatctattaaactaaaagaaacgactttaaccccttcagttgtttttaagacagcactcctttacagggagtcaggtttggtaaatataaaggatacataaaaaatacagtataaactgcataagcttaacagtagcaaaaacactgatgaacttttaaaaagtcaaaaatatataaaaatattagcctgaaatggcaaattttcaaacaccgatctgtgtaaaaatgtttaaatattgatgttactccaaaaatatatacttattctattttttttctatttgcaacagtttataaaggcaaacaaacacctgcaattgaggtagcaaaagccaaattcacaaactttggatcaagaaaaatacccttcctatgttttaacagcatcttctatacaatagngaatga

SEQ ID NO: 1376 - DNA, 263 bp, Homo sapiens
accaaaaatacatttcttaaggttaaaagcatgcacttccatgcatacttgcttttggggagagtggggagaagacattctaataatcagtttgtgaaatagcttctgttggaaaccttttgaggggaataaggaatggtcatctaaaatgagagattctggattttaatgcagttcaaagttgagctgtatttttgttgttgatttatctggattttttttaaagccttctaaaacccagtgaattcaataccttaattagt

SEQ ID NO: 1377 - DNA, 366 bp, Homo sapiens
  misc_feature 14, 15, 16, 274, 321: n = A,T,C or G
acttttgaaaatannnctgcttatttgtaaactctgtaattaggaccttttgctatttgagttatattcctttctaacttcaaacgtctgcattcatgtataatagccattttatgcacagatgaggtgattcccacacttcttttcgcagatgtttcattatctggatgagtgtattacataataaatttgaataatggtagtcttccaaacgacaaaaagcaagctagttgatttgtcaattttgagtttaaatgttttgactgcttatcangcaaaaaaaatcaaaggaatagcatactaatattaatggaaatgcanagtatatttaattggcatgattttttcatggatgtgtgcttcatt

SEQ ID NO: 1378 - DNA, 309 bp, Homo sapiens
acaaaagtatgtcttttaaaatggaagtaacgtttgtttagctagtgaatgtgacaatatattttatgtatataatgagtctaatgtaattttgatcaacttggtaatgatgttattaaatagcaaaacaagtgcagtgtattaaagctaaacactacattgaaacgcaaacaaaattctggtgaaataactgggctgttgatgcaggtcaggtggaagctgagaaataaatgtatataaatatgtagctgaggatattaattcccattatataaccataattctgtgacttgtaataaaccaagctgt

SEQ ID NO: 1379 - DNA, 186 bp, Homo sapiens
  misc_feature 49, 75, 86, 96, 103, 112, 123, 127, 137, 141, 170, 174: n = A,T,C or G
caagcttttttttttttttttttttttttttttttttttttttagggcncccgctcataaggggatggccatggntaggtttatanatagttgggnggttggngtaaatgantgaggcaggantccnaggaggttanttgnggcaataaaaatgattaaggatactagtntaanaaatcaggttcg

SEQ ID NO: 1380 - DNA, 278 bp, Homo sapiens
  misc_feature 208: n = A,T,C or G
ctccccccgagcgccgctccggctgcaccgcgctcgctccgagtttcaggctcgtgctaagctagcgccgtcgtcgtctcccttcagtcgccatcatgattatctaccgggacctcatcagccacgatgagatgttctccgacatctacaagatccgggagatcgcggacgggttgtgcctggaggtggaggggaagatggtcagtangacagaaggtaacattgatgactcgctcattggtggaaatgcctccgctgaaggccccgagggcgaaggt

SEQ ID NO: 1381 - DNA, 237 bp, Homo sapiens
actatagcataacctgcctttgctggtgtgtggcgattaggcctggtggaacttccatcaataaatcaagcgtgatcagggtgaggaacaggaaagaaggaaatatggggtgaatatcaggtggatcagagagatacagtcatggaggtcaggtgtggtatcaggaataatgtgggaggccagattgaagtccaggccaggaacaatggtaattgtgggacttaagaaagtgtgagt

SEQ ID NO: 1382 - DNA, 257 bp, Homo sapiens
  misc_feature 17, 18: n = A,T,C or G
actatagggtaaatacnngccctatttcaaagatttttaggggaattaattctaggacgatgggcatgaaactgtggtttgctccacagatttcagagcattgaccgtagtatacccccggtcgtgtagcggtgaaagtggtttggtttagacgtccgggaattgcatctgtttttaagcctaatgtggggacagctcatgagtgcaagacgtcttgtgatgtaattattatacgaatgggggcttcaatcgggagt

SEQ ID NO: 1383 - DNA, 565 bp, Homo sapiens
  misc_feature 547: n = A,T,C or G
ggaaatttacctggcagcaagagacagccacagactcctaaggaaaaggctgaggctctagaggacctggttggcttcaaagaactcttccagacaccaggtcacactgaggaatcaatgactgatgacaaaatcacagaagtatcctgtaaatctccacagccagggtcattcaaaacctcaagaagctccaagcaaaggctcaagatacccctggtgaaagtggacatgaaagaagagcccctagcagtcagcaagctcacacggacatcaggggagactacgcaaacacacacagagccaacaggagatagtaagagcatcaaagcgtttaaggagtctccaaagcagatcctggacccagcagcaagtgtaactggtagcaggaggcagctgagaactcgtaaggaaaaggcccgtgctctagaagacctggttgacttcaaagagctcttctcagcaccaggtcacactgaagagtcaatgactattgacaaaaacacaaaattccctgcaaatctcccccaccagaactaacagacactgncacgagcacaaagagatg

SEQ ID NO: 1384 - DNA, 222 bp, Homo sapiens; identical to SEQ ID NO: 1253

SEQ ID NO: 1385 - DNA, 530 bp, Homo sapiens
  misc_feature 514: n = A,T,C or G
gtttctcatcaatctttcacctgatggttttagcagctattgataattgttgcctggatccattatttcatttcaggggttgtaaaatagtgattttctggttctatcaaacctcttgcatttatcatctatgattcttctttaaggaactttctctaaatctgaatgggaaagatgcgataaatatttatcaaattttagagtgagttagtgccctagcaacctccaaagttgacaaatgagtatttctttaaagcaaggtatggcccaaccaatactatgaaactagcatgtttagaatagagcaggaggaaactatatttgaaaggtcagaagtggaaagactaagagggcctgaacaataagaggacagaaccaagaggagttggcaactaattggatgtggggattaaggaaaggtaagcatcaaagattacctccaagtttgttagaaggttagtagcaggattctgatgccattcaagtaaatacaggtctcagtcagatgggcccnaggagccacatgtatt

SEQ ID NO: 1386 - DNA, 496 bp, Homo sapiens
agaagctctatataaatccaagacaagcaacaaacccttgatgattattcatcacttggatgagtgcccacacagtcaagctttaaagaaagtgtttgctgaaaataaagaaatccagaaattggcagagcagtttgtcctcctcaatctggtttatgaaacaactgacaaacacctttctcctgatggccagtatgtccccaggattatgtttgttgacccatctctgacagttagagccgatatcactggaagatattcaaatcgtctctatgcttacgaacctgcagatacagctctgttgtttgacaacatgaagaaagctctcaagttgctgaagactgaattgtaaagaaaaaaaatctccaagcccttctgtctgtcaggccttgagacttgaaaaccagaagaagtgtgagaagactggctagtgtggaagcatagtgaacacactgattaggttatggtttaatgttacaacaactattttttaaga

SEQ ID NO: 1387 - DNA, 293 bp, Homo sapiens
gtgtcttcaatggtttgttagttgccattacaactttgtctgggtagagtttttgagtttttgcagttcagtatccctctgtctattcacacttcgtgttagtggtaactcagtttgtctttaaatagttacagaagggatacgtcatttgttaatgcttttgtgaagtgagttaaacgagctttctgtattttaatgctttagtgtttcagttttataagtgaagattttattttaaaaaccagtgggaaagagtggggggtttctttttatgtctgggtcattcaggcagt

SEQ ID NO: 1388 - DNA, 497 bp, Homo sapiens
  misc_feature 180, 181: n = A,T,C or G
acaaaaaagcaccagcaactgataaaaattgcttttttgtgcgctacccaactggttaaagccaatgtgatcttttatggtgaaactcctaagaaacaggtggttttgctggaaacttggtagacccttaattatagtggtgctaatgagcactactgtaatataaagccaccattattnnttatcaaacatctgaatacattttacaaaggctattgtgagggcattattttgagcatctattttgaggtgatgtttaaaaaaactttaacatcaaatcaaattgtaaattaatttaaatatattgccttaaggacctactaaagaatgtgccaccagactttaagtgatagttgcaatatccttgtctaaaaaaaaaaaaaaagttgacttaaacattttctttaacagttgtcttttttttctaaattcagtctttctcttgcttttttttccctgctattgaggaagtattttgccttccctactcactgaga

SEQ ID NO: 1389 - DNA, 241 bp, Homo sapiens
  misc_feature 15, 133, 207: n = A,T,C or G
acccactattattgngtttgttttatgccattattgattcttgatattcaagcatttacaatgtagcatatttgattttcttttttctttctttttttggcatcattaacatttcatttgaaatgcatattgntcttgaagtactttgtttttagcataaatgttgtgcattttatcttagtgtttggatgaaaacatttgtgttgnttagctttcatttgctttgtatatttaataatgt

SEQ ID NO: 1390 - DNA, 162 bp, Homo sapiens; identical to SEQ ID NO: 1230

SEQ ID NO: 1391 - DNA, 506 bp, Homo sapiens
accatggtaagaaacagttttaacagtagatcacgtatcagattgaatgataataaatttattgggaaatgagttagatttggacagtctgccatttttcaaaatcacagttgaaagacaatcaatcataggttgactgtaggagttgagcaaaaagcaattaagtatccttttaaaaaagcattttagttctttcctgagcaactaagtatactgtgagaatcaactggctatatgggatttacaataaagtatttgtatcttattatttgttaattgtgttatatgttcttgctatcagcaaaatttataacaaacatgtatagttgaatacataattttctcccagaagagtgaactgctaaacatttaccagcacaccactggattgggagaatggggagaaagggggaaatattttttaaaccaaagaaggaagtctgatgttttttcatttggtttttcagtttgccttcagcatccaactgccacagtgtgctttaagt

SEQ ID NO: 1392 - DNA, 270 bp, Homo sapiens
actactgcagctgaccaatccaaagccagtttacactcagcatgtgttattctactttaaaatataaccttagtgaaagcacccttcaaatcaacagcaatctcacagtgagtttcctctgggtagtcaggatttgtccagaactacatccttttcagatgttcagagttttgcttgccattagggaggcaagggaaggatgagcaataaatcaggtttctcgttcgtatcttacttcttacctaattttctccctgttgcttatttggt

SEQ ID NO: 1393 - DNA, 157 bp, Homo sapiens
acgtccatcttccagctgcttgccagcaaagatcagtctctgctgatcaggaggaattccttccttatcctggatcttggcctttacattttctatcgtatccgagggttcaacctcgagggtgatggtcttccccgtaagggttttcacgaaaatc

SEQ ID NO: 1394 - DNA, 331 bp, Homo sapiens
actttggcctctctgggatagaagttattcagcaggcacacaacagaggcagttccagatttcaactgctcatcagatggcgggaagatgaagacagatggtgcagccacagttcgtttgatctccagcttggtcccctggccaaaagttcgaggggtttgtagagcttgcatgcagtaataaattccaacatcctcagtctccactctgctgattttcagtgtaaaatctgtgcctgatccactgccactgaacctgtcagggaccccggaggcccgaaaagaacccaaatagatcaggagctgtggagactgccctggcttctgcaggt

SEQ ID NO: 1395 - DNA, 534 bp, Homo sapiens
acagtgtgatgttttgatacatgtatacattgcgtaataaccgaaccagggtaattagcatatccatcacctcaaatatgtgtcatttctttgtgttgagaactttcaaaatcctctcttctagctatttcaaaatatatgcaataggttattgttaactctagtcaccctactatgcaataaaacattagcacttatttaatgtgaagtttttaatacaaaaattattttaagaaaataagcacaggctgggcgccgtggctcacgcctgtaatcccagcactttgggaggccgaggcgggtggatcacctgaggtcagaggttctagacgagcctaaccaacatggggaaaccccgtctctactgaaaatacaaatttagccaggggtggtggtgggcacctgtaatcccagctacttgggaggctgaggcaggagaattgcttgaatctgagaggtggaggttgcagtgaaccgagatcgtgccattgcactccagcctggggaacaagagcaaaacttcatctcaaaaaa

SEQ ID NO: 1396 - DNA, 358 bp, Homo sapiens
  misc_feature 259, 349: n = A,T,C or G
accattcagttcagctgcaggtataggcagtgacaagtatctaattcttagaagaatcacttactcccacaatctgtccagacacattaatctaaggacaagtttataaatagcaaacgtgattttcacattgcagtgttctcaagaatgtatatacaagtgtgtagtcctgttgatgggatgtttccccgagttctttctattgatgcgttcatgctcttgaccctggtagagacagttctttctttccacagagcanattttcttttgtcatccaccatttacaatactctgtgaattagtattacttattacatttatgaaacggcaatatttggattgttaatanctcttcagt

SEQ ID NO: 1397 - DNA, 497 bp, Homo sapiens
acacctttaggatgctataaaaaactaatagaatatcataagaatggacacctttcttttaaatatgtgaagacctttaatatggatgaatatgtaggacttccaagaaatcatcctgaaagctaccattcttatatgtggaataatttttttaagcatatcgatatagatcctaataatgcacatatccttgacgggaatgctgcagatttacaagcagaatgtgatgcttttgaaaacaaaataaaagaagctggaggaatagatctttttgttggagggtttggttaataaaaactctaagaactgtgccaaatgggatcaaaatatcagctttattaaaggaattggtccagatggtcatatcgctttcaatgagcctggatccagtttagtgtcaaggacaagattaaagactctagcaatggataccatcttggcaaatgccaaatattttgatggagatttatcaaaagtgccaactatggctctaactg

SEQ ID NO: 1398 - DNA, 146 bp, Homo sapiens
acaaaactgtatttacaagaaaaccaattaaaaattaagggtgtgtgcaaaagtagacaggagagtcaagacatatcaatgcagggatggctttggggaatgggggactcaggttctacactggaacctggggtcatgtatcatgt

SEQ ID NO: 1399 - DNA, 146 bp, Homo sapiens
  misc_feature 13, 14: n = A,T,C or G
acctcagccccanntggtggcccgggaaccctggatgacagtgccaccatttgccgtgtctgccagaagccaggcgatctggttatgtgcaaccagtgtgagttttgtttccacctggactgtcacctgccggccctgcaggatgt

SEQ ID NO: 1400 - DNA, 122 bp, Homo sapiens
actgggattacaggcgtgaacccccgcgcctggcctgcttttctttttttaagactagctcttctaatgactaacagtgtcaaattgagcaagtacaagctttttttttttttttttttttt

SEQ ID NO: 1401 - DNA, 499 bp, Homo sapiens
acaaaagtgcttagtcaggctctaaatggagactcagactctgaagatatgttgaattcagaacacaagcacaggcataccaatattcacaaaatagatgcaccttctaaaagaaaaagttcctctgttacatcttcaggagaagattcaaaaagtcatattccagggagtgagactgataggacattttcttcagagtcaaccttggcacaaaaagctactgcagagaataattttgaagtggaactgaattatgggctgcgcaggtggaatggtagaagactcaggacctatggaaaggctccttttagtaagacaaaagtgattcatgattcacaggaaacagcagagaaggaagtaaaaaggaagagatcgcatcctgaattggaaaatgtgaaaatctctgaaacaactgggaattcaaagtttagacctgatactagttccaaatcatcagatttgggatctgtaactgaatcagatattgactgtacctcgg

SEQ ID NO: 1402 - DNA, 425 bp, Homo sapiens
  misc_feature 292, 402, 413, 423: n = A,T,C or G
actgggggaactgatgggggaactttcatcctgttaggaactccgctttccattcctgggtctctgtcttgctccctggagatggatggatcacggagggggccacagtcagctggggcaacaggtacgaataggagctcagcaggcagacgaatgaggaataaaggtcagagaaggtcagagctgagtgacgtttggaatccaccccgtttattgtagaactgggggttcagagggcaggtgcctcagagttgaggccacacagtgaggtctggtgggtgaaaggacccangaacgaggcgttcaggaaagcaggttgtcagagctatgtggagtctgtgggtggcaggggcagccgctccagcctttgaagactttgaaagccagagattcctggcgcangcttggacttnctgggagctnct

SEQ ID NO: 1403 - DNA, 315 bp, Homo sapiens
accaatttttagaaacatattgtcttctcagattgaagtggagggtccagaaatgcaacacccagcattctttaaagaaaataatagctagaatctttctgatacagattccaatatagattccattattcaaagtcctccacaaattactgggaaaatgtaagaggtaacttcacaaaaatcacatattgagtggaataattataactgatatataaataaggatttactaaaaaaaggcttcaaggggtgatattttaaatcaaggttttaaatacaaaaggtgtcttgtgttgcttaatcatacagtttcgt

SEQ ID NO: 1404 - DNA, 336 bp, Homo sapiens
  misc_feature 157, 211, 300, 301: n = A,T,C or G
acaccacctccaaaaataaaaaatggaaaacacacctttagtgaagtagaagtatttgagtatcttgatgcagtaacttatagttgtgatcctgcacctggaccagatccattttcacttattggagagagcacgatttattgtggtgacaattcantgtggagtcgtgctgctccagagtgtaaagtggtcaaatgtcgatttccagtantcgaaaatggaaaacagatatcaggatttggaaaaaaattttactacaaagcaacagttatgtttgaatgcgataagggtttttacctnnatggcagcgacacaattgtctgtgacagtaacagt

SEQ ID NO: 1405 - DNA, 446 bp, Homo sapiens
  misc_feature 323: n = A,T,C or G
acaaattctgagctgtctaacccctctgaaacggaatctgagcataaagacgagctgagtgattgatcattggcaggagaagatgatcgagacagccgacatcagcgtgacagcaggagacgcccaggaggaagaggcagaagtgtttcagggggtcgaggtcgtggtggaccacgtggtggcaaatcctccatcagttctgtgctcaaagatccagacagcaatccatacagcttacttgataatacagaatcagatcagactgcagacactgatgccagcgaatctcatcacagtacctgcccgggcggccgcccgggcangtacctggtgggtctgttcgaagataccaacctgtgtgccatccacgctaagagagtcaccatcatgcccaaagacatccagttggctcgccggatacggggagagagagcttaagtgaaggc

SEQ ID NO: 1406 - DNA, 272 bp, Homo sapiens
acagcctggagggtccctgacactctcctgtgcagcctctggattcacgttcagaaattttccaatgaactgggtccgccaggctccggggaaggggctggaatggatttcatacattagtggtagtggttctaccatatactacgcagactctgtgaagggccgattcaccgtctccagagacaacgccaagacgtccctgtttctgcaaatgaacaacctgagagccgaggacacggctgtttattactgcgcgagggcccccacatggt

SEQ ID NO: 1407 - DNA, 412 bp, Homo sapiens
  misc_feature 284, 309, 341, 342: n = A,T,C or G
tttttttttcgcaaagattcactttatttattcattctcctccaacattagcataattaaagccaaggaggaggaggggggtgaggtgaaagatgagctggaggaccgcaataggggtaggtcccctgtggaaaaagggtcagaggccaaaggatgggagggggtcaggctggaactgaggagcaggtgggggcacttctccctctaacactctcccctgttgaagctctttgtgacgggcgagctcaggccctgatgggtgacttcgcaggcgtagactttgngtttctcgtagtctgctttgctcancgtcagggtgctgctgaggctgtaggtgctgnncttgctgtcctgctctgtgacactctcctgggagttacccgattggagggcgttatccaccttccactgt

SEQ ID NO: 1408 - DNA, 189 bp, Homo sapiens
actgcaaagacacaaaatcaaaagcaacggaaaaaatagaaatacttaaagtgtggcaatactctttcacttaattctttacaagggatatcaaagccataatggacttcattagttttagggtagggaagggatactaattacttatttctttcaaaacatttttggtttttggtttttaaaattttt

SEQ ID NO: 1409 - DNA, 263 bp, Homo sapiens
ttttttactgtgaatatatactttttatttagtcatttttgtttacaattgaaactctgggaattcaaaattaacatccttgcccgtgagcttcttatagacaccagaaaaagtttcaaccttgtgttccacattgttctgctgtgctttgtccaaatgaacctttatgagccggctgccatctagtttgacgcggattctcttgcccacaatttcgcttgggaagaccaagtcctcaaggatggcatcgtgcacagctgtca

SEQ ID NO: 1410 - DNA, 356 bp, Homo sapiens
actgctgctgccttttcaccgaggcactgccaccaccagctctagcagggatgctcctgagcttggcggacatacttagatcctaacgtgccagtgagacctggctgtggagagtagcactggcagccctgcctggactccacttggcatgataccagctccagaagggaagggagtggagcaggcagtgaggagagagcctgggggtcggctggggacagccgtatgtgctaggtaggagtggagggagatatgtttaccaaatgcctgtcctgccatcctcccaggtagtcagagtgagctacatcctgccccgccttcatttccatggaaacatggcagctaggacacggggt

SEQ ID NO: 1411 - DNA, 256 bp, Homo sapiens
acgcttggagcgacctttggctacgtggctggccttgttatttcaccactctggatatactggaatagaaagcaacttacatacaagaacaattaactggagcaaagggagatatttctttgtgcagattctgtaagggctgggcagaaatgtgtatggtcaaagccaagcagttccatttacagctctgttttttacgtagttacaacatgatgtgattgtagctttttaaactatgaaacccctgagagattgt

SEQ ID NO: 1412 - DNA, 224 bp, Homo sapiens
acttttgaacaaccacacacaattcatcaagcacacacactcactcctgctcctctcacacacggccaccagagcagctcccctagttctcttgttcctcatagtgagcatagccactagcataggtccttcctaaattcaaattagtaaacaaatctgatgactcagtatctgaatcctttctgccttcatcttcttcctcttcatcatcctctgcttcatac

SEQ ID NO: 1413 - DNA, 394 bp, Homo sapiens
  misc_feature 384: n = A,T,C or G
acgcgaaattgtgttatgactgatagccttcagctacaaaaagataggactgacctggtttaaagtgttctattttgtaaatcattccatttgagtctttctgatgaacttggctatactgaaatctgttattttagtgaggctccaaaatgagcaaagctaggcctgattagagtagagtgactattaaaaaacataactttctaggagctataaatcaaagttttaaaaagatgtttggatatatttgagtattccgatcatgaaaacagaaattgccctgcctactacaaggacagactgatgggaaattatgcacctggtcaacttagcttttaagcagacgatgctgtaaaaactaacggcttctctgatatttattgnaagttttagt

SEQ ID NO: 1414 - DNA, 489 bp, Homo sapiens
  misc_feature 458, 466, 476: n = A,T,C or G
actctgaggcttgtaggagggtaaaatagagacccagtaaaattgtaataagcagtgcttgaattatttggtttcggttgttttctattagactatggtgagctcaggtgattgatactcctgatgcgagtaatacggatgtgtttaggagtgggacttctaggggatttagcggggtgatgcctgttgggggccagtgccctcctaattggggggtaggggctaggctggagtggtaaaaggctcagaaaaatcctgcgaagaaaaaaacttctgaggtaataaataggattatcccgtatcgaaggcctttttggacaggtggtgtgtggtggccttggtatgtgctttctcgtgttacatcgcgccatcattggtatatggttagtgtgttggttagtaggcctagtatgaggagcgttatggagtggaagtgaaatcacatggctaggccggangtcattangagggctganagggcccctgtta

SEQ ID NO: 1415 - DNA, 339 bp, Homo sapiens
  misc_feature 55: n = A,T,C or G
ttttttttttttttttggttcagtctaatcctttttgtagtcactcataggccanacttagggctaggatgatgattaataagagggatgacataactattagtggcaggttagttgtttgtagggctcatggtaggggtaaaaggagggcaatttctagatcaaataataagaaggtaatagctactaagaagaattttatggagaaagggacgcgggcgggggatatagggtcgaagccgcactcgtaaggggtggatttttctatgtagccgttgagttgtggtagtcaaaatgtaataattattagtagtaaggctaggagggtgttgattatta

SEQ ID NO: 1416 - DNA, 185 bp, Homo sapiens
cgacagcttgagtctcattgttcaggactagcctaggcaacatggcaaaaccccgtctctacaaaaatttttttaaaaattagccgggcatggtggcgtgcgcccgcagtcccagctacctggaaggctgaggtgggaggatggcttgagcccgggaggtagaggttgcagggagccgagactgt

SEQ ID NO: 1417 - DNA, 456 bp, Homo sapiens
acaattaaaaggtcatctatctcataactgacggctcaggtctgtccagttgccataattgcacaactggattccagctgctggtaataaggaattgtgtagatagataaagggcaagagtatgtctgcaatccaaaataaatgagagttaacacataattagccttttgattattttggcagctatcctcaccatttagtaaagggtatactaacaatacccaactttatttaacaaagttttgtaagcatacctaagtagtaacttgatatgctgaaaaatctgacctgtcacttcgcttcactctgaccagtaattgcagattgtcgtcaccatcctagcctatgactacattaggattttatgacttattaacttgaaaatctgttctgtaagtggcattggtagaatctcccactttgctcctcactgtccaattgtgtaaagattaaggt

SEQ ID NO: 1418 - DNA, 238 bp, Homo sapiens
  misc_feature 14: n = A,T,C or G
acagaaaacattanaaaaaatttattacagaattctaattccagtatgaatagtggaaacccatctgtaaattagatggatgttggatggaaaatgacattgctaaatttgagaatttctttttacctactaatgtagattgctttgtataataaaacacagggtttggaaggttttgttacagggagcatggtctgttgaagatttttaaaatgtatttttctagattaacttctgt

SEQ ID NO: 1419 - DNA, 386 bp, Homo sapiens
acatgaggccaaggtgaactgtgcatcctgagaccttgtgtccctgagtctcctttctgagtgcaagctgcactgtgagctggctgtgggatactcacacattcccacattctcctttctgccacatctcgcccttctggacctgcactgggagaaattcaggacaggagtgaactcaaggccatgaactcactggatttccatttttaggcacccatagggatgtttttaggatgtaagtttctgaggagaaagctagctctagcatgaagcttttttggattggcttctccatcgtgttggggtaacattttttttccaattttttttttcccaaaacatcgtctcagctcatttatcaagtaggtaaaatgagccttttgtgt

SEQ ID NO: 1420 - DNA, 392 bp, Homo sapiens
  misc_feature 37, 102, 191, 203, 262, 370, 374, 381: n = A,T,C or G
acaagctttttttttttttttttttttttttcctttnatcaaagtcttttagtgtactgtacactaaataaaatacacaaggcagcaatacttaggggccanaaacactgcttactacaagtcagttacggaatcataatttacagtaaaaatgggcacgtcccaaggctcaatttttctttttcttttgncatttacagtanaataaatattttgttgctattgctacactttaatttacattctaacctattaaatgcanaaagctagtgtaaagcatatagattaagtgtaggtcccatacgtatgacagtttgttcaaaactagtaggtttttgtttttgtatctttttttaacttattaaatggntagngggaaanatttgtgcttg

SEQ ID NO: 1421 - DNA, 368 bp, Homo sapiens
acaaacaatgtttatttgtttgtaaagtgccaggtttatatttaagtaaacattaaaatctgcgttgaagcagtgaggctgcatcttttaactggctgtgctggttaaaggactgtttaatcccgctgtgctaagctcactaaagggtcacccctcactttaaagccaagactgccattgtcactgctatggtaagtcacagccagccaggccttctggcaaaaggtgatactaccagcactataaacagacaggactggttgtgaggtagctacacagttttaaagatgctgttaatgaacattacggacaattcatggtgtggctagttggtaacacttcagctgatttttcttatgagatggaaa

SEQ ID NO: 1422 - DNA, 245 bp, Homo sapiens
  misc_feature 18, 19, 179: n = A,T,C or G
actgcaatcacaatgccnnatggtgtttatgggctatttgtgtaagtaagtggtaagatgctatgaagtaagtgtgtttgttttcatcttatgaaaactcttgatgcatgtgcttttgtatggaataaattttggtgcaatatgatgtcattcaactttgcattgaattgaattttggntgtatttatatgtaattatacctgtcacgcttctagttgcttcaaccattttataaccatttttgt

SEQ ID NO: 1423 - DNA, 583 bp, Homo sapiens
  misc_feature 548: n = A,T,C or G
actaccccaaataactttcttattgctctgaaagaagaaaagcaatgtaaatcactatgattattgcgcaaacaaccagaattctccaacaattttaagtaatctgatcctcttcttggagaaaattgttacctaatagtttttccttatgaatgttattactactggtataaatcaaatttctataaatttcctacttaagtcttaagaactgggttcttcctttgatgttattcatgttcagaaaggaaacaacactttactcttttaggacaattcctagaatctatagtagtatcaggatatattttgctttaaaatatattttggttattttgaatacagacattggccccaaattttcatctttgcacaatagtatgacttttcactagaacttctcaacatttgggaactttgcaaatatgagcatcatatgtgttaaggctgttatcatttaatgctatgagatacattgttttctccctatgccaaacaggtgaacaaacgtagttgttttttactgatactaaatgttggctacctgngattttatagtatgcacatgtcagaaaaaggcaag

SEQ ID NO: 1424 - DNA, 351 bp, Homo sapiens
actgtgaggttgcaccttccattatttgagtgcctggaaggattcctctgatgcattcattcagaaatggcatccactgggagacccagggaaaggagagagcaggctgctgggctcagctgcagcaactttgggaggggctaggggcatgagatacggaccaggatatttttttaccttctagagagcacagggcacatagcagccaggctgcaacaaatatgactcccacacactgctcttttgccattcacaaataccactttttaaaacaatacaaggctcattccacagaaggtaaatgaaagaaaccccactctccaagttctcaaaatgggattgctctcaagt

SEQ ID NO: 1425 - DNA, 157 bp, Homo sapiens
ccgggctgctgataaaagaagtaaggctttgaaagcttcagcgcctgctcctggtcatcactaaccagatttacttggagtacatgtgaaagaaaacgtcagtctgcctgtaaatttcagcaagccgtgttagatggggagcgtggaacgtcactgt

SEQ ID NO: 1426 - DNA, 509 bp, Homo sapiens
acccagacaaaacccggccacgtgtaagtcagatgctgattttgactccatttcaaggtcaaggccatggtgctcaacttcttgaaacagttcatagatactacactgaatttcctacagttcttgatattacagcggaagatccatccaaaagctatgtgaaattacgagactttgtgcttgtgaagctttgtcaagatttgccctgtttttcccgggaaaaattaatgcaaggattcaatgaagatatggcgatagaggcacaacagaagttcaaaataaataagcaacacgctagaagggtttatgaaattcttcgactactggtaactgacatgagtgatgccgaacaatacagaagctacagactggatattaaaagaagactaattagcccatataagaaaaagcagagagatcttgctaagatgagaaaatgtctcagaccaggaagaactgacaaaccagatgaaccaaataggaaataagcatgcaacatgaacagctgg

SEQ ID NO: 1427 - DNA, 519 bp, Homo sapiens
acttgaaacttagctctctatcctgaaagttgaagttagggttctttgatcctggtgagatgttaattgtaattttaattttcatatgttaatattgtgacttgtattttgtgatgagtctctagaatgattaaatgactatttttttatgaaaaattttttgttaataaaatatctgagggtattttgagtatgtggaaggaatgcctgaatagaagctgatctatcttaacatacctcaagaactccagttttaatatggtgagtgaggagttgactggaaaaaggagagatccaattcttgttctagtccttggcacatacactctctgggttttgagaaaaggatggtcctacaacgattctaagttgttttctcattggtcctacaacaattctaagttgttttctcaaaggcaaaagcatgatttcaaaatgacatcacttgtcagattttctggtgtatggaaagatttaataaatcctgcctcttttgaagcctgaaacttacaatttaaa

SEQ ID NO: 1428 - DNA, 484 bp, Homo sapiens
  misc_feature 474: n = A,T,C or G
actgggcgggtgaaacgattaccacccatagtgcgaggaggagccatcgacagatactggcccaccgccgacgggcgcctggttgaatatgacatagatgaagtggtatatgacgaagattcaccttatcaaaatataaaaattctacactcgaagcagtttggaaatattctcatccttagtggggatgttaatttggcagagagtgatttggcatatacccgggccatcatgggcagtggcaaagaagattacactggcaaagatgtacctgcccgggcggccgcccgggcaggtactcccgattgaagcccccattcgtataataattacatcacaagacgtcttgcactcatgagctgtccccacattaggcttaaaaacagatgcaattctcggacgtctaaaaccaaaccactttcaccgctacacgaccgggggtatactacggtcaatgctctgaaatctgtggancaaaccacag

SEQ ID NO: 1429 - DNA, 327 bp, Homo sapiens
  misc_feature 15: n = A,T,C or G
ttcgcgagagcctanagccagatgcctatgcgttgttccataagaagctgaccaagggtgtgctgatgcgggaccccaagttcttgtggcgtgcccagtgctcctttggcttcatatatgagcgtgagcagctggaggcaacttgtccccagtgtcaccagaccttctgtgtgcgctgcaagcgccagtgggaggagcagcaccgaggtcggagctgtgaggacttccagaactggaaacgcatgaacgacccagaataccaggcccagggcctagcaatgtatcttcaggaaaacggcattgactgccccaaatgcaagttctcgt

SEQ ID NO: 1430 - DNA, 507 bp, Homo sapiens
ctgtcaaatacatttcagttcactaatgaagcccgagaaatgggtgtgattgctgccatgagagatggttttggtttcatcaagtgtgtggatcgtgatgttcgtatgttcttccacttcagtgaaattctggatgggaaccagctccatattgcagatgaagtagagtttactgtggttcctgatatgctctctgctcaaagaaatcatgctattaggattaaaaaacttcccaagggcacggtttcatttcattcccattcagatcaccgttttctgggcacggtagaaaaagaagccactttttccaatcctaaaaccactagcccaaataaaggcaaagagaaggaggctgaggatggcattattgcttatgatgactgtggggtgaaactgactattgcttttcaagccaaggatgtggaaggatctacttctcctcaaataggagataaggttgaatttagtattagtgacaaacagaggcctggacagcaggttgcaact

SEQ ID NO: 1431 - DNA, 213 bp, Homo sapiens
acatgctttctttgcatctggcacctgagcaccaaggctgctgagtcccacgatggagtagaaggcagattccaaatttgtgaaagggcgatccagcgaggcttttagtctctccacgtcatgcttggtgaggtagtgagtgggcgtcagagcccaggtgctggctatgattgtcagggccaacaggaagacagtgcttgaacccggcggcgc

SEQ ID NO: 1432 - DNA, 250 bp, Homo sapiens
actatagggtaaatacgggccctatttcaaagatttttaggggaattaattctaggacgatgggcatgaaactgtggtttgctccacagatttcagagcattgaccgtagtatacccccggtcgtgtagcggtgaaagtggtttggtttagacgtccgggaattgcatctgtttttaagcctaatgtggggacagctcatgagtgcaagacgtcttgtgatgtaattattatacgaatgggggcttcaat

SEQ ID NO: 1433 - DNA, 580 bp, Homo sapiens
  misc_feature 505: n = A,T,C or G
acacttgaaaccaaatttctaaaacttgtttttcttaaaaaatagttgttgtaacattaaaccataacctaatcagtgtgttcactatgcttccacactagccagtcttctcacacttcttctggtttcaagtctcaaggcctgacagacagaagggcttggagattttttttctttacaattcagtcttcagcaacttgagagctttcttcatgttgtcaagcaacagagctgtatctgcaggttcgtaagcatagagacgatttgaatatcttccagtgatatcggctctaactgtcagagatgggtcaacaaacataatcctggggacatactggccatcaggagaaaggtgtttgtcagttgtttcataaaccagattgaggaggacaaactgctctgccaatttctggatttctttattttcagcaaacactttctttaaagcttgactgtgtgggcactcatccaagtgatgaataatcatcaagggtttgttgcttgncttggatttatatagagcttcttcatatgtctgagtccagatgagttggtcaccccaacctctggagagggtctg

SEQ ID NO: 1434 - DNA, 168 bp, Homo sapiens
  misc_feature 91: n = A,T,C or G
acagccccagtctttgcaatttatcatcgatgcgtttaagggacaggtatttgccttatccacacatccttatggctgccgagtgattcanagaatcctggagcactgtctccctgaccagacactccctattttagaggagcttcaccagcacacagagcagcttgt

SEQ ID NO: 1435 - DNA, 565 bp, Homo sapiens
acacacatgttctcatatatgtatatatacatacatattcatatatgtgtatacatatatacatatgaaacaagtttttaaatgttggcagcatattttcacaactgcaacctaaacaaccactggaagtgggggtccacttaagttttgtttgccattagcttaataggggaaagctattttaattttccctgcaactttttggatatgagttatgatctcaaaatgtcatttaactattgcactaaaaagtaatttgaccttggaactcctttctagatggaaggagaataaagacatctgtagcatgtaattctatttttatttcttgactacataacctagcagtggtctaatactgaccgtttcaatttaaatgctggaaaaatactgaccaagactttctgtgaaaaagataatggaaaacagaaaccagttagtaaagccatgcaaataggaagtgattttcagccccaagaggactttgtatcatctatggctccatttaaacccaaagtagcatccgtcctggtggattttgaacatccttttgatttaacacaga

SEQ ID NO: 1436 - DNA, 361 bp, Homo sapiens
actttccaaaagctaagggatgaaagaaaatctactgtttatcggccataaggttatatactgtttcttagcaaccagggtttgtctttcagagactagaagtcgatgaaaaaggagagactaaaaataaaaccatctggacagttccaattcacagaggcagcacttcaaaggcagtgatgttgtgataaaccatactgttgagttaaagttcattccattggctagaaagagaggctcatgacacttgcttaataaatgtttcccggatactcactgcagtccctgaaccaaagaccaggaataaaagctacctatctgttcctgcatagagcacatatcaacatcagggatgagaggt

SEQ ID NO: 1437 - DNA, 321 bp, Homo sapiens
gacagattggaagtggggcaacctcagttgtcagggaatctgccagggcaggcggatggaagctggtcgtgcaagcctcatgagctttctgttttgggaggccattttgagctttctgttctgaaaccctgggagccatcgctggggcctaagaagggacgagactctccaggtctgagatggaaaaatcaccctagaaaaataccaactcagaaaataaaaagcagaaagcaactgtatttcaggtttgagaacctacttagaattttaaaagtcatcttgaaaatgtaagtttagaataatttattagggttttattgt

SEQ ID NO: 1438 - DNA, 406 bp, Homo sapiens
acagcaattgtagtaactgacacatcctctctttgcaagctgctgactgggcacactcatgccaagtttcagaattattggtcttctgggtttttgctttttaaaagaggtgtgggagcagaggaatggaaacaatcgtgagtttttgagctagggaaagttggagctcctttaatctttttaaaggatcagtgctgccctaagtgaataaactcaattgtccatctttattttagagttttaatgaattcaaggaagggagcatagcatatctgtggcaaactattttccactcaaatcctgagttattgctgcatgctttaatttcttccctttcagcatctgagaaccttaaagccaatgtctgcgatctttttttagatatttatacttttagatatatagt

SEQ ID NO: 1439 - DNA, 257 bp, Homo sapiens; identical to SEQ ID NO: 1267

SEQ ID NO: 1440 - DNA, 181 bp, Homo sapiens
acagagattgctttttaatggatttctataagtagtattaataggaaaaagcatataatacaatctactctgtatctaagagctttaatttattcaaatattggaagaaattcatcttctgaatttttcttatttaaaaagcattatgagaactgattcaaggatggaggaatcaattagt

SEQ ID NO: 1441 - DNA, 181 bp, Homo sapiens
acaacaaagactatttacaatgcaaaaagtatataaaccacaatttaacagtctgctactggcagccactatagtttaggaggtagctttaattaaacgaaatgaacagaagccacatttcccaacttgtgttctaaaaataatttacataagataaaaattcattatatacacagtatgt

SEQ ID NO: 1442 - DNA, 444 bp, Homo sapiens
  misc_feature 390, 403, 443: n = A,T,C or G
accgcggccgttaaacatgtgtcactgggcaggcggtgcctctaatactggtgatgctagaggtgatgtttttggtaaacaggcggggtaagatttgccgagttccttttactttttttaacctttccttatgagcatgcctgtgttgggttgacagtgagggtaataatgacttgttggttgattgtggatattgggctgttaattgtcagttcagtgttttaatttgacgcaggcttatgcggaagagaatgttttcatgttacttatactaacattagttcttctatagggtgatagattggtccaattgggtgtgaggagttcagtttatatgtttgggatttttttaggtagtgggtgttgagcttgaacgctttcttaattggnggctgctttttangcctactatgggtgttaaaattttttactctctctacaang

SEQ ID NO: 1443 - DNA, 473 bp, Homo sapiens
gtggtgttgagctgattattaacagttactgaaatcaaatatttatttgttacattattccatttgtattttaggtttccttttacattctttttatatgcattctgacattacatattttttaagactatggaaataatttaaagatttaagctctggtggatgattatctgctaagtaagtctgaaaatgtaatattttgataatactgtaatatacctgtcacacaaatgcttttctaatgttttaaccttgagtattgcagttgctgctttgtacacgaacttgctccaacagtgctgaaattcgtcataattcatgatcttcatggtggcacgcggaccgtctcttttctgacacaggctgcgaagcgcctcctggtaatctgggtcccagaagtagtagaggcgggcaacaaagatggtcagggtaaccttcgggtcctcggccaggaacgtggccatatcccttgc

SEQ ID NO: 1444 - DNA, 289 bp, Homo sapiens
gcgagtaagatggaagatgaggaggtcgctgagagctgggaagaggcggcagacagcggggaaatagacagacggttggaaaaaaaactgaagatcacacaaaaagagaggaaatccaaatctcctcccaaagtgcccattgtgattcaggacgatagccttcccgcggggccccctccacagatccgcatcctcaagaggcccaccagcaacggtgtggtcagcagccccaactccaccagcaggcccacccttccagtcaagtccctagcacagcgagaggccgagt

SEQ ID NO: 1445 - DNA, 385 bp, Homo sapiens
  misc_feature 376: n = A,T,C or G
caattatcatgtttataaggttgggtgggctaggtaagatgatgtagagggtgacattaaagtgtagaacagagaccacttaggtggaagcaggcagccttggactttgctaaagaccagtccatgtgactgacatggggtcacttcaaatggtagtgcctccctcactgaagagcatcagaagggcttctgagcaaggccagaatgagcctcgatgaacatccaagttgaccaaccagtgtggtgcctaacagaggacagagccaccagcaggggtgctcaggggctgctccccttttattaatgacagcggtttctctcaaggaagtgtagtgccctcccctttgggatagttgcctgacccctgtccatcagnccttcaagt

SEQ ID NO: 1446 - DNA, 572 bp, Homo sapiens
  misc_feature 15, 16, 564: n = A,T,C or G
accagaagaccttannaaaaggaggaaaggaggagaggcagataatttggatgaattcctcaaagaatttgaaaatccagaggttcctagagaggaccagcaacagcagcatcagcagcgtgatgttatcgatgagcccattattgaagagccaagccgcctccaggagtcagtgatggaggccagcagaacaaacatagatgagtcagctatgcctccaccaccacctcagggagttaagcgaaaagctggacaaattgacccagagcctgtgatgcctcctcagcaggtagagcagatggaaataccacctgtagagcttcccccagaagaacctccaaatatctgtcagctaataccagagttagaacttctgccagaaaaagagaaggagaaagagaaggaaaaagaagatgatgaagaggaagaggatgaagatgcatcagggggcgatcaagatcaggaagaaagaaggatggaaacaaaaggactcagcaggatgcttcatggtcttcagcgtgctctttgctaaaaactggagctgaatctatcagtttgcttganttatgtcg

SEQ ID NO: 1447 - DNA, 228 bp, Homo sapiens
actgtgagggatagacaagcctccatccacagctcccttcagggcaccaaaaactttattgccagtggtagttctggcaaggcctgcatccaaatagcaggtgaaggcacctggctgaccatcaatgctttccacattgtattcatcaccagtcacctccacttggccttcatagatcttgtccatgccaaacctattgagaagcctgcgggccagcagcaggccagt

SEQ ID NO: 1448 - DNA, 333 bp, Homo sapiens
  misc_feature 230: n = A,T,C or G
ggtggggcagcacacctctggggggataatgtccccactcccgaaagcctttcctcggtctcccttccgtccatcccccttcttcctcccctcaacagtgagttagactcaagggggtgacagaaccgagaagggggtgacagtcctccatccacgtggcctctctctctcctcaggaccctcagccctggcctttttctttaaggtcccccgaccaatccccagcctangacgccaacttctcccaccccttggcccctcacatcctctccaggaagggagtgaggggctgtgacatttttccggagaagatttcagagctgaggctttggt

SEQ ID NO: 1449 - DNA, 606 bp, Homo sapiens
acattgctttgacttaaaaattgaagtccattattctgaccgaaagttaatctgatgattaattggttaaacatactatcgttgctaattagcataattattatttacaataaagtgagctaaatagctacaactaaaatatatttaaattactgtgatattgtgatgctaaagatgtgttgaaattaatatcttgaatttctcaaccctgcctaaatgcctctgagagtaattagtataattaaaagtcactagagaaagtgaatgactctaataacaggataacaaattcttttcaagtcagatggtttccagttctttgctttcaacaaaattaatggtggcccatgaattgtcagctgatgaaggaacactatttggtttttggcatgcaactcggaaagaaaccaaacgattgattgacatgcttacaacaaaactactagcattctcacctatttatgtaaaaccatttctcagcacttgtatctgtgaaaacaacagaattgaaaatgaaccctgttaatctaccagtaggaactattcatccagataaaatgaattaattggtgggtcagccccatctatctcactaagagatgtgtt

SEQ ID NO: 1450 - DNA, 536 bp, Homo sapiens
  misc_feature 27, 28, 107, 403, 457, 484, 498: n = A,T,C or G
gctttaaaataatagaccttacaaagnnttctagacagacttcctgtgaagaacaaggagcagggggaaaggggaaggggtagaatttaccaatctgaatatttcancaagggagaatgcatgagttttactataaaaccacactgaacattgcaacaatactaaattccatacatatataataatcactgagctataaggttgctgatgtatttgttcttgaaagtgaattagagttactttatgcagaatcagctagttttatgtttcataatgtctttcccttttttgaacttttttttaagtctaaagtagggggaaccaagcctgctggtggtgattttggagaagtcttgaattcggctgcaaatgctagtgccaccaccacggagcctcttccagnaaaagacacaggagagcctgtgagattcctacctttgttctgctacccactgcnagatgctgcaaagcgaggcccaagcanatcttgtcaaacangcattgccatgaaatttctaccagatgtgcttttattt

SEQ ID NO: 1451 - DNA, 314 bp, Homo sapiens
  misc_feature 291: n = A,T,C or G
cagtgccctgccagtagctcctagagaggcaggggttaccaactggccagcaggctgtgtccctgaagtcagatcaacgggagagaaggaagtggctaaaacattgcacaggagaagtcggcctgagtggtgcggcgctcgggacccaccagcaatgctgctcttcgtgctcacctgcctgctggcggtcttcccagccatctccacgaagagtcccatatttggtcccgaggaggtgaatagtgtggaaggtaactcagtgtccatcacgtgctactacccacccacctntgtcaaccggcacacccggaagt

SEQ ID NO: 1452 - DNA, 520 bp, Homo sapiens
  misc_feature 431, 494: n = A,T,C or G
acacacacatggggaacacaccacagcttagatgtgacaaagttccttctcatatgactgttccctcaaggtaagactaagatgggagggggagaaaaagaatcctaaaaagccaatttttaaaaattctgctttggctgattttgtgctataatgggtagctgatttctaaaaatcatatttcttcaaagagttttatatcgaaaggaagactaaatgtaatgtgcctttccttataatccaggaaaacaactgtggtatttcaaaaattctaaaaatatctactttcatgaaatagtaactatttcactacaaacctatttttcactaaatacacacatttcctaatcctggagcctcctgggaaaagcagtgggttctccctgggtcttgcaagactccagtgtttcacaggagagtgtggggaatancttcaccccgtctcctgggatgggctttgtcagaggtcacgtgcagagacgctatcagacttncaccaggcatgtttaagcaattaccc

SEQ ID NO: 1453 - DNA, 470 bp, Homo sapiens
  misc_feature 455: n = A,T,C or G
acatcgaccgcattgccatacctgatgcctctaagctgcaattcatcctagcagaggagcagtttatcctttcccaggttgcactcctggagcaggtgaatgccttggtgcccatgctggacagtgctcacatcaaagccgttcctgagcatgctgcccgcctgcagcgcttggcccagatccacattcagcagcaggaccagtgtgtggaaatcactgaggagtccaaggctctcgtggaggaatacaacaagactacaatgcttctctccaagcaattcgtgcagtgggatgagctactttgccagctagaggccgccacgcaagtgaagccagcagaggagtgatagctgctccccatcccaaggtgggcctgggcagtcaggctccagggccctatgccaacctgcctttgttacaaggcaggaggaagctttgtatttattggcttcaangcccacctctctgta

SEQ ID NO: 1454 - DNA, 297 bp, Homo sapiens
  misc_feature 269: n = A,T,C or G
actcagggttctgaatcactgggggttcccactctccgtccatctcttcatcccagtcctcgggcttcttagcatcagggtcggggatatgctcgggcttgtcccagtcctcaggcttggagtctgtgggatcatcgatcttggcccgctcatcccagtcttccggttttgaagcatcaggatcctttatcttcttgggtggcaggaagtcccaatcgtcttccaaggagccggactccacctggctgttgtcaatcttcacctcatangtgttgtctggccgcacaatcagtgtgt

SEQ ID NO: 1455 - DNA, 238 bp, Homo sapiens
acaaggcccctctgcaactggagagaaaattaattcctatcccgtgagtggattgtgagaaattccacccacgtggagacagcttactgcagcactgttggtgttcggagctcttctgtgccctggctccatgctttcacctacacaagcatcaccttcctaatcaccgcggggcggggagcgtgtggctgtgccccttctctttaatctcatttaatttttattaaacatgctcagg

SEQ ID NO: 1456 - DNA, 452 bp, Homo sapiens
  misc_feature 422: n = A,T,C or G
actatctgcccgtggtggggatggcagtaggatcatatttgatgacttccgagaagcatattattggcttcgtcataatactccagaggatgcgaaggtcatgtcctggtgggattatggctatcagattacagctatggcaaaccgaacaattttagtggacaataacacatggaataatacccatatttctcgagtagggcaggcaatggcgtccacagaggaaaaagcctatgagatcatgagggagctcgatgtcagctatgtgctggtcatttttggaggcctcactgggtattcctctgatgatatcaacaagtttctttggatggtccggattggagggagcacagatacaggcaaacatatcaaggagaatgactattatactccaactggggagttccgtgtggaccgtgaangttctccagtgctgctcaactgcctcatgt

SEQ ID NO: 1457 - DNA, 548 bp, Homo sapiens
  misc_feature 371: n = A,T,C or G
accttcctctcaattttgctgtgaacctgaaatggctttaaattaatactcttattttttatttaatttaattacataaattaaaccttaccatgaccaaattgtgttaggacggcctgctatctacagcacagtgtgtcatttgcagatttgtggttacctataccacgctaggtgttttgacatgtttagtatttctgctttacagtgctgaattccatattttagaagctatgaaagtccttttatgaaaaagttactgattgcttctcagttattaggaaaacagttgtttcacaattattatgtagatatgatgcccaaatatcatttttagtatatcttgtcgatctttaagttgttactattgngttattcatgtctttaaatcagataccaaatattttttaggaaagaaaaatgttattactgtcattaggttgtcttttaatactttaagttattttgacgaaaagtaatagagaaaatttacttagcattttagattctagagacatggaaatgaaaattattttatgtctagagta

SEQ ID NO: 1458 - DNA, 246 bp, Homo sapiens
actaatgtagttccactgtcaagtcttaacattcttcaaaccagtgtctggggttgatagactatttgtttgacatggcacaatgttttgaattgggtgggaatcttttcccccagttagaaaaacagatttaaataacttgtgctactgaaatcatttttacggaaaaatgagatgtgaatcagttcaagttccagtctaatgagttaatgtctctcactctctggcttcatgccatgtctccgt

SEQ ID NO: 1459 - DNA, 301 bp, Homo sapiens
gctttcaacaaagattgaaattaaactgaaaaagccagaggctgtgagatgggaaaagctagaggggcaaggagatgtgcctacgccaaaacaattcgtagcagatgtaaagaacctatatccatcaccatctccttatacaagaaattgggataaattggttggtgagatcaaagaagaagaaaagaatgaaaagttggagggagatgcagctttaaacagattatttcagcagatctattcagatggttctgatgaagtgaaacgtgccatgaacaaatcctttatggagtcgggtggt

SEQ ID NO: 1460 - DNA, 417 bp, Homo sapiens
actcctgaaatcagacatgttcctgtagaaagaattttaagttaggctttctatgcacctatcaagaatcaagagaatagattgtatcaaacaacggcagggaaatccttcagcaattctaatccactttgggttttcagctgtttttacatctaaagcaatagactagaactgaattatcttctacatagtaaaatcacaattgtggaattacaggaattctggtgatattaaggtgaaataacaaaacacaaaaggccctattttaacagttgatgtgacagtaagttttaatagaacctgtaacttcattttggaaatgcttctccaccaaataagggctttttcccctatttaaggagccagatggattgaaagatgtggaaataggcagctgtagatcttgatcttccaggt

SEQ ID NO: 1461 - DNA, 476 bp, Homo sapiens; identical to SEQ ID NO: 482

SEQ ID NO: 1462 - DNA, 257 bp, Homo sapiens
actatagggtaaatacgggccctatttcaaagatttttaggggaattaattccaggacgatgggcatgaaactgtggtttgctccacagatttcagagcattgaccgtagtatacccccggtcgtgtagcggtgaaagtggtttggtttagacgtccgggaattgcatctgtttttaagcctaatgtggggacagctcatgagtgcaagacgtcttgtgatgtaattattatacgaatgggggcttcaatcgggagt

SEQ ID NO: 1463 - DNA, 288 bp, Homo sapiens
  misc_feature 29: n = A,T,C or G
acaattacccaccactggatttgactcanagaggacccccagagggtgtctccatcttccctatttattttcagcccttgagggcttcattgtagatcaaagccaaggcccccaggaaggtgacatactcctggaagttcacctcctggtccttgttccggtccaagtcttccatcagccttgcaatttcagcatcctgcagcttcgagccaatggtgagctccttctggatcagctccttcagctccttcttgctcagggtgtgcttgtcaccctccctgccggagt

SEQ ID NO: 1464 - DNA, 122 bp, Homo sapiens
acctgaaaactgtgagcggataagtcaaagtggggactttctcaggtatcattacaatggcacgcttctggatggcaccctctttgattccagctgctctcggaaccgcacgtttgacacgt

SEQ ID NO: 1465 - DNA, 496 bp, Homo sapiens
actattagaatgagtaacagagaacaaaccaccagcagcaaaaggttctaagtctgactgatgtgtagatgaactgacagatgagaaatttttaaattagagctatttggcccacatccttaatatttcaagatcaacataaaaataagaaatacaggtgggaatgataaagaatatgtctaggtcagagaaaaacattttgtctttcagttatcagctgtaatttgcatttccatcaccatctaataaacctttgaatataaatgtggacagagttatctgaattatctcttgcattccctgatctgaaaagttggaaatttattctaactcagacatcttggtctcctatgttgacaaggtgtttagtaataaaatgattttcacactgctgttccttcctgcccccttccctcccctagcctcacctcattgaattcagcacagttttgaaagatcaatctaaaatcagctacaaaatcttcaggttttgagt

SEQ ID NO: 1466 - DNA, 545 bp, Homo sapiens
actcaactaaattggagaatgtttctgaagaaaattggatgaaattagctgctgagattgagtttctgccttaaaatctgaaacaaaaaaagggacaaattgctggtagatctactgactgtagccatcaccagaacacttagtttcttcccagacatgaatttcctgacaggctctgagccagaaacacactgtgggcgtgcatctggttcagccctggatatgcctccactgtggagggaagcattggaactggagttgtgcacagcaccgcagctagtgggcctggctgggggtgcagaagggcagggtagttctttccatttccccttgcagctacacttactttctccctgactaccaaatggagtgacggttgaagaatcaagctcataatatgatacacccagacagacccagaaatcttttgatttccccagcgagatacttaccactctctcttctctttcccatggttaaaacaggagttgtgttctctgtcgctgctaaattattcttcacttgagtgaagcaaatatttagct

SEQ ID NO: 1467 - DNA, 351 bp, Homo sapiens
acacctttgccattgcggacgaagaggactatgctggggaggtgaaggacctggggctcagcgagagtggggaggatgtcaatgccgccatcctggacgagagtgggaagaagttcgccatggagccagaggagtttgactctgacaccctccgcgagtttgtcactgctttcaaaaaaggaaaactgaagccagtcatcaaatcccagccagtgcccaagaacaacaagggacccgtcaaggtcgtggtgggaaagacctttgactccattgtgatggaccccaagaaggacgtcctcatcgagttctacgcgccatggtgcgggcactgcaagcagctagagcccgtgt

SEQ ID NO: 1468 - DNA, 505 bp, Homo sapiens
  misc_feature 488: n = A,T,C or G
actgcttgatggtgtccagggtctcttcctcacgcttcagtttgataacgtttgggtctgggaccactttctgggcaaacttccacacagagtcttcaaaggtggcggagaaaagcagcatctggcagttcctgggcagcatcctctggatgcggatgctctgatcttggtggccctgagtggctatcatgacatcagcctcatccagaacaaacaccttgattttcttgggatcaatgaacttgagcttggagcaccagtccagcacagtcccaggggtgccaatgacaatctgctcactgatcttctggcctctttccaatttattgcctcgaacagcataagctagcttcagttcagggtaaaatttgcccatttgttcaatcacttttcctgtttggagggcgagctcatacgttggggagagacatagacactgggggtatttgtttgcaggttctacttggctaagcatggccagcacgaangcagctgttttaccagt

SEQ ID NO: 1469 - DNA, 215 bp, Homo sapiens
actacaagcccaccaagctaaagaggctgcccagaaagcagttaacagtgccaccggtgttccaactgtttaaaattgatcaggggccatgaaaagaaacttgtgcttcaccgaagaaaaatatctaaacatcgaaaaacttaaatattatggaaaaaaaacattgcaaaatataaaataaataaaaaaaggaaaggaaactttgaaccttatgt

SEQ ID NO: 1470 - DNA, 667 bp, Homo sapiens
acatatagtcaatgaaatattcaaagaataactttatatactcttgttctttaaattctatcctctctttcagaattcttccatttaagtttgggtattttcctagtttcaacagatgaacagaagacttcattgaacattttgacagtaagctactagagaccaattatcaactggtgctacacatgctgtgttatctcccttactattaaactataaccctctcttgctattttgtttcatgcatcaccaaccaaacttcattttttctaataaaaaataaatatataaagaagacactgacaggcatatattcacaagatctcaacttcttaaaacataagtatgggtatatttatttctctcaaatgcatacaagacaataattacacagcaacaaatcttttgttcaacaatgatttgattcataagcatttgaaatttacataatttcatatcaatacccttgtatttttaaatacagtaagtaaaaaagcccccaaataaccaattcttatatttcctatttatccctctatacatccaaacttttaaaaagttacaaactgaacattatacagaacatataaatcatgtttaaaaacttgaggttttaaaaatcactgcttccccaatatgattcagaaaaattctcatactgacaagt

SEQ ID NO: 1471 - DNA, 165 bp, Homo sapiens
  misc_feature 89: n = A,T,C or G
acatttaaggactgggctaatgctaatgtcagcagacagattgaggacactgtattatacggttactatactttatattctgttatatngttctgtgtgttcttctggatcccttttgtctacttctattatgaagaaaaggatgatgatgatactagtaaatgt

SEQ ID NO: 1472 - DNA, 152 bp, Homo sapiens
ccatgcaaatctattaatcactaagggctaagtcactaaactacagctttcccatgatgctcaccatccatcctttgcggaaaccaaaatgctcacaactgaccatggtgttcacttagtatactagcttaaattaaaaaaaaaaaattagt

SEQ ID NO: 1473 - DNA, 402 bp, Homo sapiens
  misc_feature 39, 72, 97, 143, 163, 175, 189, 195, 217, 265, 322, 335,339, 341: n = A,T,C or G
tttttttttttttttttttttttttttttttttaaaaanaattgtttatttaccgaacctggggcatattanatacaaccaattttaaatttacatnttttaaatcagttttgaagtgtttcacacacacaaaaaacttggcntgcaacagttgtcctaaggngaaagtcacctnattaataaactgtngcaagngttctcacccaagggggaagtntggtttatcctgaacatgaaaacctgtaacaaatttaaattaattatntaaaactcgttacttgtagttttgcccttgcaaagatccaaaaaaaaaaaaaaagcncaagtaactaatntgtntnagtcacaacataatcctggatcatccccataccaaaaccggatgcttttttaattttaaac

SEQ ID NO: 1474 - DNA, 173 bp, Homo sapiens
  misc_feature 148: n = A,T,C or G
acccttgagacctggaaccagagccacaggccccttttgtgggtttctctgtgctctgaatgggagccagaattcactaggaggtcatcaaccgatggtcctcacaagcctcttctgaagatggaaggccttttgcccgttgaggtanaggggaaggaaatctcctcttttgt

SEQ ID NO: 1475 - DNA, 364 bp, Homo sapiens
  misc_feature 90, 92, 103, 115, 116, 128, 129, 136, 148, 155, 205, 206: n = A,T,C or G
acatctcaatcagatcacgtagtgtctttaaataggctattgcattgccgtctgtattacagcactgtcaagaaatctacaaaacacacntnacacactcttnaaaaaacaagtnnaacacgcctttnncgtcctncaaaagaggttncacagcnataagaaaaaacaaaaaccaccgtgaaagtaaagtgcttgtcattgcttnnaagaggaaacacacaatggtttctgaggcctttgatctatggcattagaacagaaatcattttaaaaaggggaaggagttttgtgttggaatcaattgtgctacctctgtaaaaatgaaggcaagggcctggctgccccaagatggtctggattctct

SEQ ID NO: 1476 - DNA, 521 bp, Homo sapiens
acacttgaaaccaaatttctaaaacttgtttttcttaaaaaatagttgttgtaacattaaaccataacctaatcagtgtgttcactatgcttccacactagccagtcttctcacacttcttctggtttcaagtctcaaggcctgacagacagaagggcttggagattttttttctttacaattcagtcttcagcaacttgagagctttcttcatgttgtcaagcaacagagctgtatctgcaggttcgtaagcatagagacgatttgaatatcttccagtgatatcgactctaactgtcagagatgggtcaacaaacataatcctggggacatactggccatcaggagagaggtgtttgtcagttgtttcataaaccagattgaggaggacaaactgctctgccaatttctggatttctttattttcagcaaacactttctttaaagcttgactgtgtgggcactcatccaagtgatgaataatcatcaagggtttgttgcttgtcttggatttatacctc

SEQ ID NO: 1477 - DNA, 427 bp, Homo sapiens
acagtttcagggcaagaaaacgaaatttgctagtgatgatgaacatgatgaacatgatgaaaatggtgcaactggacctgtgaaaagagcaagagaagaaacagacaaagaagaacctgcatccaaacaacagaaaacagaaaatggtgctggagaccagtagtttagtaaaccaattttttattcattttaaataggttttaaacgacttttgtttgcggggcttttaaaaggaaaaccgaattaggtccacttcaatgtccacctgtgagaaaggaaaaatttttttgttgtttaacttgtctttttgttatgcaaatgagatttctttgaatgtattgttctgtttgtgttatttcagatgattcaaatatcaaaaggaagattcttccattaaattgcctttgtaatatgagaatgtattagt

SEQ ID NO: 1478 - DNA, 561 bp, Homo sapiens
acagttgtttatatatttgtttcagggccgaaactgggatgaggcaaatgacaggatcattattactgacttttctttagccttgggctccaatgtggcctgatatggcaatattaaattttgtcttcatttaaaattttgatattttgttaatcatgaatcttttggaatcattcagttttttaaaatattatatttaagtatttttatgttaattacttagttttgagcacccccttaaatggtatgcccaaggttaagcaccagattttcttaactcacttcaccctaatctagtcctaatttgttgaatgaacagtgagttctccccaggttgactactgacttgcaaactgtaactaatgaccagagaagccagaaacatagggtcttagataattggagcttgagatgatcgactgtagtatccaatccaatggaacccagaagtaggcaaataaatatcagcaagttaaagagtgagctggcttttgacacctagtccatgctttcctatcctactgtcagaatgcttgtagaaacagagatgtgatattaaga

SEQ ID NO: 1479 - DNA, 516 bp, Homo sapiens
acttgcctcaggtccatatagctagagtggctttcaatctaccacaccacaaaacctatattctctgtattaccttccattgtcttgggttaaaaaaacaaaacaaaaatatttgagaagagagtgacagcaatgctaatatgtatatatatactgttttaccacactgataacttgagactagaaaaggtgctaatatttggtcagaattatcctattttacatgaaatataaatattttatttagatttatatatgaaattaaatttgtcttcaagacatcaagaatagactgatctaaaaaagtgtaaagtaatccacctacttcccatactcactgctagtatcatccaagccaccatatctcatccagatttctataccagcttcctaacttatctccctgtatccattcttgccctgtttgaatccattcatctcaccacagccagggtggtcctttaataaaaataaatctgatgatgttactctcctgctcacaggttcaaaacccgt

SEQ ID NO: 1480 - DNA, 356 bp, Homo sapiens
acttccaactctgggttggccccaaatccaactaatgccaccaccaaggcggctggtggtgccctgcagtcaacagccagtctcttcgtggtctcactctctcttctgcatctctactcttaagagactcaggccaagaaacgtcttctaaatttccccatcttctaaacccaatccaaatggcgtctggaagtccaatgtggcaaggaaaaacaggtcttcatcgaatctactaattccacaccttttattgacacagaaaatgttgagaatcccaaatttgattgatttgaagaacatgtgagaggtttgactagatgatggatgccaatattaaatctgctggagtttcatgt

SEQ ID NO: 1481 - DNA, 600 bp, Homo sapiens
  misc_feature 581: n = A,T,C or G
cgcatcctagccgccgactcacacaaggcagagttgccatggagaaaattccagtgtcagcattcttgctccttgtggccctctcctacactctggccagagataccacagtcaaacctggagccaaaaaggacacaaaggactctcgacccaaactgccccagaccctctccagaggttggggtgaccaactcatctggactcagacatatgaagaagctctatataaatccaagacaagcaacaaacccttgatgattattcatcacttggatgagtgcccacacagtcaagctttaaagaaagtgtttgctgaaaataaagaaatccagaaattggcagagcagtttgtcctcctcaatctggtttatgaaacaactgacaaacacctttctcctgatggccagtatgtccccaggattatgtttgttgacccatctctgacagttagagccgatatcactggaagatattcaaatcgtctctatgcttacgaacctgcagatacagctctgttgcttgacaacatgaagaaagctctcaagttgctgaagactgaaattgtaaagaaaaaaaatctncaagcccttctgtctgtca

SEQ ID NO: 1482 - DNA, 374 bp, Homo sapiens
gagcgcagaaggcaggactcgggacaatcttcatcatgacctgctcccctctcctcctcacccttctcattcactgcacagggtcctgggcccagtccatcttgacgcagccgccctcagtctctgcggccccaggacagaaggtctccatgtcctgctctggaagcgcctccaacattggaactaattatgtgtcgtggtatctacaattctcaggaacagcccccaaactcctcatttatcacaatgatggccgtccctcagaaattcctgaccgattctctgccaccaagtctggcacgtcagccgccctggccatcaccggactccggactggggacgaggccatctattactgcgcaacatgggatagt

SEQ ID NO: 1483 - DNA, 504 bp, Homo sapiens
acataatagaagggctgacggaaaaatcatcccagatcgtggacccttgggagaggttgtttaagattttgaatgttgttggaatgagatgtgaatggcagatggataaaggaagacgaagctatggagatattttgcatagaatgaaggatctctgcagatacatgaacaactttgatagtgaagcacatgcaaaatataaaaaccaagtggtgtattccaccatgctggtcttctttaagaatgcattccagtatgtcaacagcatacagccatctctcttccaaggtcctaatgccccgagccaagttccactggttcttcttgaagatgtatcgaatgtgtatggtgatgtagaaattgatcgtaataaacacatccataaaaagaggaaactagctgaaggaagagaaaaaaccatgagttcagacgatgaagactgttcggcgaaaggaagaaatcgtcacattgtagtcaataaagccgaacttgctaactccactg

SEQ ID NO: 1484 - DNA, 343 bp, Homo sapiens
  misc_feature 156: n = A,T,C or G
acttgtttttacatatatagcttatgtaatttctttatataaattaatgcttaataactgaaagcaagtgagctccaaagatgaaatttcagaaacagtatacatgaatgagtgtgttctactggtctgctaagagctttaaatggaagtggccgntcaaagcacagtgtcctgttaactcttgagtgctaagtagatctttgcaacagtaagcttgattgatcatgggttaaaaagagagaatattgaaatagatgttttaatacaggctggaaatcagctattcaacactatcattgatttagtatacaagaaatcatatggattaactgaacttaatagt

SEQ ID NO: 1485 - DNA, 342 bp, Homo sapiens
  misc_feature 52, 53: n = A,T,C or G
catgttttaagtagctacaggagctatagatttgaatctaatgttgcattanncttttcagttatcttctacctcctgtattttctactgtaataatgtaatttaaggccttccacaatgaacagttcactttattccctgggttttctataaacagttttaaggatatgatttggttaaaaaataatttgttataaaaattctgtttgcaaattaaactggaaaagtatccagagtctcaaaaggcaatgatttgtgagataatatggcatgcccggagccctgctcatcaatgaaaaacccatatgtaataatcgaattcatttaacatgaatcttgagt

SEQ ID NO: 1486 - DNA, 233 bp, Homo sapiens
acctttaccctcaggcaaggagcaatctcttctcttcctcttctaccttgctgtagcttctccccaaggatttatcacattctgccttgaatcatagggaacagcatgtgtagtggaatgaacacaggcctctgaatccaagatacgagtttaaatcccagctttggaggtggttacttaaagtctcagtgccttcattcttcttcctatataaagtagatattacacactat

SEQ ID NO: 1487 - DNA, 374 bp, Homo sapiens
acagatggcggccaagaaccccacacatccagctcgatgtcacaatatggggaacatctgacatcacccatcatggctgatcagcagcctccacaggtgggtctttcaggaggcaggaagtagagcgagggtccatggctgagtgcattatagtgatataaacatcatccatgtttggcatgacaaaaactttctgaaactcttgctccagtttcttctctatccagtctgtcacatgaactaaagtcacttctctctctccaagttttggccgagctttcagctccacatgtggtggctttcggaaaccataccatactcggtcagtcgggggtggtggaatgttgaccgccaaggttcctctacattcttgg

SEQ ID NO: 1488 - DNA, 76 bp, Homo sapiens
actgatgctgtcagtgtttaacactatgtttagctgtgtttatgctataaaagtgcaatattagacactagctagt

SEQ ID NO: 1489 - DNA, 302 bp, Homo sapiens
acaagtgaaggtgtcagtaaagaaatgcatcaccttcagcgcatgttcttacagaattgctgggaaattcctacttatggagcagcatttttcacaggacagatatttacaaaggcaagccccagcaatcataaagtcatccctgtgtatgtaggagtgaatataaaaggacttcatctcctcaacatggaaactaaggctttactcatcagtcttaagtatggttgttttatgtggcaattgggagatactgatacttgttttcagatccatagcatggaaaataaaatgagctttatagt

SEQ ID NO: 1490 - DNA, 383 bp, Homo sapiens
acagaactcagaggaaaaaagaaattaaattttagctttctggagagcagcccctctctggcaccatcaaacacttctttgtttcccttcaacttggaactcttcaaacatcaggggttgtgagggtttggccattcttttatcttgggtccgtgtgagtgacagaaatggtgcggcctgggaaagatctccctcctttacattttctcttctccctcctcctccttattctaaaactgtgcctccaacagaggggcaggggctcttgtagagagatccctggcccaggacaggagatgccaaatctaatttatctcactgagggcctttgagaaaaacgcttctgggccaggctcagtggctcatgcctatatagtcccagt

SEQ ID NO: 1491 - DNA, 223 bp, Homo sapiens
acccctttattgctcaaagaaagcaagccacaaacaataatgaagcaaaaaatggaatctaagaatctttttgtatggaatattacttctatcagaagatgatcaagatgtttcagtccagtgcacatcagcattgctgacattttatggattctaaacttgtgttgtttcttttttaaatcaactttttaaaaaaataaagtgtaaattaaccgactagagt

SEQ ID NO: 1492 - DNA, 523 bp, Homo sapiens
  misc_feature 213: n = A,T,C or G
acttaattactaagcactaactctgtgggctaggcactgtggaaacctaacaattcttgctttcaacatttttaaattctaataattggagagaagacgaaaggacacgaataaatacaaggcaaaaaggcatgctggaatacaatgactatatatgatcatataaaggtatttcaccggaaatccttagtgagcagatggtttaatttgtangaattccataaaagaaaaatgtttcttaacaattagtgaaacaacttacttgtgaatggtctgttttttttaaaggcaaccaacccataaagtgagacatagcaatgtttgtgcagcatactaatgttctaagtaagattttggtatttgacaataaatgaataaaaaccatgtatttttattttaaccattacaacaatacaattgcagatacttgtgtatttgttcaattagattaagaaattaaaaagaaaaaaatacaataaaaggggtaggcatcccatgacactgatttccaatgtggtacctc

SEQ ID NO: 1493 - DNA, 361 bp, Homo sapiens
actcttgtggggatgagactaagttaagttcacccaaagactctgtggtatttaagacgcagccttcctcattaaaaattaagaagtcaaaacgaagaaaagaggatggtgaacgttctcgctgcgtatactgccaggaaaggtttaatcatgaagaaaatgtcaggggaaaatgtcaggatgctccagaccctattaaaagatgcatatatcaagttagttgcatgctctgtgcagagagcatgttgtatcattgtatgtcagactcagagggagatttttctgatccctgttcgtgtgacactagcgacgacaagttctgcttgcgatggttagccctggtagctttgtctttcattgt

SEQ ID NO: 1494 - DNA, 440 bp, Homo sapiens
  misc_feature 127, 278, 410: n = A,T,C or G
actcctctctacccctaaggttgggctctgcctcagaggagtgagttttttttttttttctataaagtttacattgtcttactatttattgagttgaatttctggtcattgcctatgcaaatataanaaatctggctttaaatattagtcagtttcatggctatgactagattgttttcttgtataactaaatacctgtataaaatgaactaatgttttctctcccctccctaccccttccttatgaacaatgctttaggtatattgaaatctttaanagcagtagagctgaagttagaactcattatgatccaccacgaaagcttatggccatgcagcggccaggtccttatgacagacctggggctggtagagggtataacagcattggcagaggagctggctttganaggatgaggcgtggtgcttatggtggaggt

SEQ ID NO: 1495 - DNA, 407 bp, Homo sapiens
  misc_feature 142, 143, 157, 166, 174, 175, 184, 201, 231, 250, 254, 264,269, 271, 314, 316, 326, 327, 347, 348, 372, 376: n = A,T,C or G
caagcttttttttttttttttttttttttaagaggaaaacccggtaatgatgtcggggttgagggataggaggagaatgggggataggtgtatgaacatgagggtgttttctcgtgtgaatgagggttttatgttgttaatnnggtgggtgagtganccccattgngttgtggnnaatatgtanagggagtatagggctgngactagtatgttgagtcctgtaagtagganagtgatatttgatcagganaacntggttactancacananagttctcccagtaggttaatagtggggggtaaggcgaggttancnaggcttgctnnaagtcatcaaaaagctattnncgggagcagagtttgaagtccttnaganaggattatgatgcgactgtgagtgcgttcgt

SEQ ID NO: 1496 - DNA, 212 bp, Homo sapiens
catataaatagaatcatggaagctttttatattacctgttttatggccttatagaattaatgaaccaaatgaaaactgaatctccattccacaatcccatcctttatttctattcttattttcaaggtagtattaagtgtccatatttctcaagccacattcaaggaaatcatgtcttaactattttggatgttgcctctccttcatcgtgt

SEQ ID NO: 1497 - DNA, 188 bp, Homo sapiens
aacacagcaagcctggatctgtgccacttgtgtcagagaagaagaaacacgtagtggcagttgtaaaataattggtattcctaacaatcctgatgtataattatttgttacttttgatttgagaactctacaaataaaagtgctgggactagattaattgcaaaaaaaaaaaaaaaaaaaaaaaaaaa

SEQ ID NO: 1498 - DNA, 324 bp, Homo sapiens
  misc_feature 295, 309, 313: n = A,T,C or G
actttgcccgaatgtgctccttgatgttaagtaaggaattgccagcaaggattcgtttcctgctgcaggataccgtagagttgcgagaacaccattgggttcctcgcaaggcttttcttgacaatggaccaaagacgatcaatcaaattcgtcaagatgcagtaaaagatctaggggtgtttattcctgctcctatggctcaagggatgagaagtgacttctttctggagggaccgtccatgccacccaggatgaaaatggatagggacccacttggaggacttgctgatatgtntggacaaatgccangtangcggaattggt

SEQ ID NO: 1499 - DNA, 282 bp, Homo sapiens
acgttgtatggtttgttttttttttttaaccaagatttaaattaaaaaaaatttgagaacacataatagaagaaaattgtgagaatggggtggtcaatatgtgaggggcatacacacaccaaggtcagatttggcattaggggtttatgggtagtttcggagagagccatttgagcagaaaggtggggaaagaagctagacctcaggggattggagagagctcaggcgacactggagggaggtgggggcagccagaatggactcactcctatgtttggtggt

SEQ ID NO: 1500 - DNA, 470 bp, Homo sapiens
acctttgagtcattaaaatgtcttaaaagataacagcttgttaccagaacattagaaaccatagccatgattctcaagcgttaacaatctacatttgatattttcttggccactgcattcttcaatgaataataatttccagaattccattccatgttgttttccaatagatcttttcacactcgatgttgaatacatggctctttgcagatgaataaaacaagtgcattcagtttagagatccattttgcgaaggctcattcgactgaaggaatctctgtggcaggtgacaggcaatactgccttgtataactgagggatctttctgttgatcagtggctgtagggcctctttaaggcgatgatagtttctctccagttccctttgatactccttttgatccggcccaattaagctcttattttttcttaaggcatcttcacaccttttagtaaaatctttaaggcgat

SEQ ID NO: 1501 - DNA, 417 bp, Homo sapiens
acctgctggggtcatcgggagacttgaagtccaggtcatacttcccagacctgaagaactcggaggccgctacgtccatgccgatgaccaccttatcagtgtagccagctttcccaatagcagtcttcagcagctccaggccttctttattctccaggatgttgggagcaaacccgccttcatcccccacattggtggcatctttcccatatttctccttgatgacattcttcaggttgtggtaaacctctgctccaatgcgcatggcttccctgaagtttgctgcaccgactgggaggatcatgaactcctgcatggccagcttgttgccagcatgagaaccgccattgatgacattgaacgccgggactggcaggatgacttcagagttgccagccaagtcagcgatgtggcggt

SEQ ID NO: 1502 - DNA, 233 bp, Homo sapiens
acaaaaaaaaccttacataaattaagaatgaatacatttacaggcgtaaatgcaaaccgcttccaactcaaagcaagtaacagcccacggtgttctggccaaagacatcagctaagaaaggaaactgggtcctacggcttggactttccaaccctgacagacccgcaagacaaaacaactggttcttgccagcctctagagaaatcccagaacactcagccctgacacgttaa

SEQ ID NO: 1503 - DNA, 492 bp, Homo sapiens
  misc_feature 460, 473: n = A,T,C or G
acaatgttatgtcgggaacacgtgctgctaactcactggtgagttcaatggcaacgcttcattcgggaggctgttctgctttacgcatctgagaactacataggagagcaagtgtctgcacctcctaactgcagaagctaccgtcttctcaaagacgaaggtctttgcaaagttcagtgctcggtgttctcggcacaacaatgcagtgtagttcagaaggtattttggcaactcttaatctgaacaagaatggggggggcgcttttgaaaaataaggctttaagaaggcttgtcattttagggctaaattttaatagaatgtgagtctgaactcttacatttagaacaaacaaaaccttaaaattactgattggttcaaaaaatggttttatggaaaaattaatctgtaacaaaaagttggcattgagtgcgaaggttccaccgttgtttttttttttgntttttttttttgnttttttttgagcaaagcgt

SEQ ID NO: 1504 - DNA, 413 bp, Homo sapiens
  misc_feature 163, 210, 376: n = A,T,C or G
acaataacctctaaaatatttgaagattatgacatataatatgatgaggattacatatgaaactattataagtagtagtaattattattccatataatactaattatacttggtcatttttccccctgaattgtttccccaggaattctttctgcttgttaantttgctgtgtatttttcatgttgctcttttccttaaatatttgctgnttctcatttgtctacttgcaaatgagagcctaggagtcaacaaactttttatataaagggtaggctttaaggcccaaacacagtatctgtcatatattgttttggtgttctacaaccctttaaaaatgtaaaatctactaagaaataggtagtggaaggcctgtanatagcagttttccaaccaataaatttctcagtatcat

SEQ ID NO: 1505 - DNA, 464 bp, Homo sapiens
acactgatctgagatcgcaccactgcactccggcctgggcgacaaagtgagactgtctaaaaaataataataataaaaagcattttgaaattagtcgtggtcaatgcaattctactctttggaatccgtttagctaaatgaatgtagtgctcttgttgaatggaaacaggtgataggaaatgcctaccatttgactcaatatggataatcaagagttgctcaggatgcttggatctgggggtagattctcattcatcattgccctggcacatgtcaattactacataaaaggtcaaatgcaatgtcaaatccaaagcctcaggaggaaagtgagttcagttcccaagagaacagcaatagctcaacaatgtaaaacttcatctagagtatatcggcattaaattagtgctgtcgaaacaatacgttgaggaattacagtaacacctggaagttccttctcatgt

SEQ ID NO: 1506 - DNA, 542 bp, Homo sapiens
  misc_feature 9, 10, 538: n = A,T,C or G
acccagtanntcttcttcaaggaaaaattctcaggggagtaacagaagcctggatacaattactctatcaggagatgaaagggactttgggagactgaatgtgaaattgttttataattcttcagtagaacagatctggatcacagttttacagtgcagagatttaagttggccctctagttatggagacactcctactgtttctataaaaggaatacttacattgcccaaaccagtgcatttcaaatcttcagccaaggaaggttccaacgctattgaatttatggaaacgtttgtatttgctattaaacttcaaaatctacaaactgtaagacttgtatttaagattcaaacccagactcccaggaagaaaaccattggagaatgctcaatgtcactcagaacccttagcacacaggaaatggattactctttggatataacaccaccttcaaaaatttctgtttgccatgcagaacttgaattggggacttgttttcaagcagtaaatagcagaattcagttacaaattcttgangcac

SEQ ID NO: 1507 - DNA, 469 bp, Homo sapiens
acacaaatgtttatttctcaattaaacattccctttaaacacaaggaatgagttctaaatcttcataaagatgaattaaaaatgaaatccctccagtatagtgtatataatcactgtgttcttggtcactactggcatttactgtttaacatcaaaaacaaagacaggtcatttaaaaatcatgctactggatttctagctcttcctctatgaccagttctacactgatctgcaatgtttaaaagtttacatcaccaaatcaaagcaagtttaaggtgtgaagtagctgtgcattaaacacaaaataaacaataaaattataagatatagtcaagttcataacgaatataggtgttcttatctacattggttcccaggacgctctcatagcacattacccaagaatctacaacgatgataagaacacctatattcgttatagattcttgggtaatgtgctatgagagcg

SEQ ID NO: 1508 - DNA, 255 bp, Homo sapiens
acaatgaattccttgatttttcaaggctgaccctgtttccttggttaacaatttcaatttaggccttataggaaaaaacgtaagggatcctttatctgcctccaactaggtaagttatttgataccactgacagcttaaaaagtaatgtcctaacctttctgaagattctggttgccataaccatgctactacagtctgttgttagtttgctctattaaaactaattggtctggagaaaacctacctgcagttgt

SEQ ID NO: 1509 - DNA, 474 bp, Homo sapiens
  misc_feature 109, 116, 125, 235, 242, 269, 300, 307, 359, 408, 455: n = A,T,C or G
acaagctttttttttttttttttttttttttttttaatcatatttgatagcagctttttttattggttacaaaacctaagcccatatacaaaattaggaacacatttanatgcctnttttgaaanaacgttttagtctttttaaactgagtttaaaaaaaaataacaatgcaatttttaaacactgttttgaaaacttaaaagtgcagcaatatacctagtttcctttatctacnaaatggngcaattccaattcaaaactggtaaggncacaaattgaatcaaggaaatgcatacaagngtctgcnctacttgatgctaatgttcacttaaatgttagtttgcactttaaaacatganaggaaataggaatcatcacagtagaggcccaattttaatcataatgggngcaaattttaaaaggtaactgtcagttaagtaaggaaagtccagaanaaactaaactggaaggggt

SEQ ID NO: 1510 - DNA, 326 bp, Homo sapiens
actcatgattggctttaatatttctttacactatacatactgaaaatgtttacatttactaataaggaatgccaagcgtatccatcaccatttgaatagcttgcaggggatttgtgatttcttccatgttatctcttctcaaaacccaatctggcttaagtcttgaaactattctggtccttacaggtgtttctgggataaaaggaatgcttatagaagaattcttcttttgcttgtaaagtattctttcagtattcattttatgtttatgagctgtaagtttgtagagactgtaaatacggtcaacaactttggacctacttcgt

SEQ ID NO: 1511 - DNA, 227 bp, Homo sapiens
cttctatggtggatggtttgaaaccaggtcagagaaaggttttgtttacttgcttcaaacggaatgacaagcgagaagtaaaggttgcccaattagctggatcagtggctgaaatgtcttcttatcatcatggtgagatgtcactaatgatgaccattatcaatttggctcagaattttgtgggtagcaataatctaaacctcttgcagcccattggtcagtttggt

SEQ ID NO: 1512 - DNA, 357 bp, Homo sapiens
accattcagttcagctgcaggtataggcagtgacaagtatctaattcttagaagaatcacttactcccacaatctgtccagacacattaatctaaggacaagtttataaatagcaaacgtgattttcacattgcagtgttctcaagaatgtatatacaagtgtgtagtcctgttgatgggatgtttccccgagttctttctattgatgcgttcatgctcttgaccctggtagagacagttctttctttccacagagcagattttcttttgtcatccaccatttacaatactctgtgaattagtattacttattacatttatgaaacggcaatatttggattgtaatagctcttcagt

SEQ ID NO: 1513 - DNA, 370 bp, Homo sapiens
acatgggtgaattttatatgtgatttttgttttgttttgttttgttcagattaactgcttatagccttagaaagccttttacaaaattaaaaaaaaaatagatgtgcattcagtttttaagaatggaatcatccaaaggaattccttttttgaggtttggatgttgcagctagtaaaggatatttttgctctgttcagcagttctaaaaattgctgaagtaggggccaggtcactggtagttatagtatggaatgggagaagtgaaagttcagttatagaactttccatacttccaagtttactgcaagtttttatgcttgagagagatgctttctaatataagactgatgtgttgattttactgattgt

SEQ ID NO: 1514 - DNA, 289 bp, Homo sapiens
caagtctgtggcttggtgagtctgtgtggccagcagcctctgatctgtgcagggtattaacgtgtcagggctgagtgttctgggatttctctagaggctggcaagaaccagttgttttgtcttgcgggtctgtcagggttggaaagtccaagccgtaggacccagtttcctttcttagctgatgtctttggccagaacaccgtgggctgttacttgctttgagttggaagcggtttgcatttacgcctgtaaatgtattcattcttaatttatgtaaggttttttttgt

SEQ ID NO: 1515 - DNA, 200 bp, Homo sapiens
acagaattgtccatgtgctccaggactagttgggctatgacagacaccacagattgctctgcaacttccggggaacattatctgagtcacatgcttctctggtcatgtttttccaacatcaaaatgaaacacttttctccatggaatgtggagtgacaaattatctcaaaccaaagtcatccttcatcatgacggcatgt

SEQ ID NO: 1516 - DNA, 567 bp, Homo sapiens
  misc_feature 551: n = A,T,C or G
acgatcgaagggactacgtcttcattgaattttgtgttgaagacagtaaggatgttaatgtaaattttgaaaaatccaaacttacattcagttgtctcggaggaagtgataattttaagcatttaaatgaaattgatctttttcactgtattgatccaaatgattccaagcataaaagaacggacagatcaattttatgttgtttacgaaaaggagaatctggccagtcatggccaaggttaacaaaagaaagggcaaagcttaattggcttagtgtcgacttcaataattggaaagactgggaagatgattcagatgaagacatgtctaattttgatcgtttctctgagatgatgaacaacatgggtggtgatgaggatgtagatttaccagaagtagatggagcagatgatgattcacaagacagtgatgatgaaaaaatgccagatctggagtaaggaatattgtcatcacctggattttgagaaagaaaaataacttctctgcaagatttcataattgagagaattcctgagttgatagctctaaangcagatatgctgtatt

SEQ ID NO: 1517 - DNA, 411 bp, Homo sapiens
  misc_feature 327, 399: n = A,T,C or G
cccccagctggctagagatttatttgttgtaaatgctgtatagatttggttttcctttctttacttaccctggtttggatttttttttttttttttgaatggatttatgctgtcttagcaatatgacaataatcctctgtagcttgagctacccctcccctgctgtaacttacgtgacctgtgctgtcactgggcataggacagcggcatcacggttgcattcccattggactcatgcacctcccggatggtttttgtttttttcgggggttctttggggtttgtttgtttgcttcttttccagagtgtggaaagtctacagtgcanaaaggcttgaacctgccagctgatttgaaatactttcccctgcgcagggccgtatgcatcctgccaagctgngttatattctgt

SEQ ID NO: 1518 - DNA, 532 bp, Homo sapiens
  misc_feature 506, 516: n = A,T,C or G
accctctcttccagcacccaggccagtattgagatcgattctctctatgaaggaatcgacttctatacctccattacccgtgcccgatttgaagaactgaatgctgacctgttccgtggcaccctggacccagtagagaaagcccttcgagatgccaaactagacaagtcacagattcatgatattgtcctggttggtggttctactcgtatccccaagattcagaagcttctccaagacttcttcaatggaaaagaactgaataagagcatcaaccctatgaagctgttgcttatggtgcagctgtccaggcagccatcttgtctggagacaagtctgagaatgttcaagatttgctgctcttggatgtcactcctctttcccttggtattgaaactgctggtggagtcatgactgtcctcatcaagcgtaataccaccattcctaccaagcagacacagaccttcactacctattctgacaaccagcctggtgtgcttattcangtttatgaangcgagcgtgccatgac

SEQ ID NO: 1519 - DNA, 501 bp, Homo sapiens
gcggccgactcgcaagatggcgccgcagaaagacaggaagcccaagaggtcaacctggaggtttaatttggaccttactcatccagtagaagatggaatttttgattctggaaattttgagcaatttctacgggagaaggttaaagtcaatggcaaaactggaaatctcgggaatgttgttcacattgaacgcttcaagaataaaatcacagttgtttctgagaaacagttctctaaaaggtatttgaaataccttaccaagaaataccttaagaagaacaatcttcgtgattggcttcgagtggttgcatctgacaaggagacctacgaacttcgttacttccagattagtcaagatgaagatgaatcagagtcggaggactaggcaaaggctccccttacagggctttgcttattaataaaataaatgaagtatacatgagaaataccaagaaattggcttttagtttatcagtgaataaaaaatattatactctcgaa

SEQ ID NO: 1520 - DNA, 406 bp, Homo sapiens
ctcctgacatagccagctgctgtgaaataatggaagagcttacaacctgccttaaaaattaccgaaaaaccttaatacactgctatggaggacttgggagatcttgtcttgtagctgcttgtctcctactatacctgtctgacacaatatcaccagagcaagccatagacagcctgcgagacctaagaggatccggggcaatacagaccatcaagcaatacaattatcttcatgagtttcgggacaaattagctgcacatctatcatcaagagattcacaatcaagatctgtatcaagataaaggaattcaaatagcatatatatgaccatgtctgaaatgtcagttctctagcataatttgtattgaaatgaaaccaccagtgttatcaacttgaatgtaaatgt

SEQ ID NO: 1521 - DNA, 435 bp, Homo sapiens
actttacccttcaacgggacaagaaactgcaccagaagtcaacttcacatttgaaggagaaactggaaagaatccagatgaagaagacaacacattttatcaaagacttaagtccatgaaggaaccgctagaagcacaaaatattccagacaattttggaaatgtatctccagaaatgacgctcgttctacatttagcctgggttgcctgtggttatataatatggcaaaattctactgaagacacatggtataaaatggtaaaaattcaaactgtcaagcaagtgcaaagaaatgatgactttattgaattagactacaccattctacttcataatatagcatctcaggagattattccctggcaaatgcaagttctctggcatccacaatacggcactaaagtaaaacataatagccgtctgccaaaggaagt

SEQ ID NO: 1522 - DNA, 245 bp, Homo sapiens
acaatgacggggaggaagagggttggttaaagcatccctctaagcagttttctgctgtcccttctttccaatcagagatttgtggatgtgagggatcacaccacccccagctatggtagccttgataagagaatccaactcttcatcaccacggattgcaagctgcaagtgacgcggagtgatacgctttactttgagatccttagaagcattacctgccagctccagcacctctgcagtgaggt

SEQ ID NO: 1523 - DNA, 272 bp, Homo sapiens
acatggcaaaaccaacaatgctgtgtccttccggagtccagtgctctttcggcacttctgcaaccaggcagtggtaaaaggggtgctctccaaaaccatcttctagcagatctttttcagttaagattacttgttcttccatgtattcatatttagccagctccttgatcagccgcagtatgtcactgcagtcggcggcagtggctgggcggatcacgaatttagccattttcgtcttttgcttttcttccctttgcggaccaggcccctgt

SEQ ID NO: 1524 - DNA, 289 bp, Homo sapiens
gaggaaggtgggtctgaatctagcaccatgacggaactagagacagtcatgggcatgatcatagacgtcttttcccgatattcgggcagcgagggcagcacgcagaccctgaccaagggggagctcaaggtgctgatggagaaggagctaccaggcttcctgcagagtggaaaagacagggatgccgtggataaattgctcaaggacctggacgccaatggagatgcccaggtggacttcagtgagttcatcgtgttcgtggctgcaatcacgtctgcctgtcacaagt

SEQ ID NO: 1525 - DNA, 543 bp, Homo sapiens
  misc_feature 445, 464, 470, 476, 489, 527, 532: n = A,T,C or G
accaaagcttacatttgtaaataactataaactgcaatattttacaggaaaaaagaaatagcatttttacacatttttaaataatagcttgcatacttttttttttgccgaaagtggcatttttcagcatccagagggtttgggcatagtggcgagtggggtatctgttgttgttgttttttgttttagacatgtagaggtgtggcttccgaaccccgtgagtcctagacagctttctatcttcccacagctgcatgcatgtttcctcacaaaccagttctgcatataaaagctcattttttaattattaaataagttttgtgtctgacacagcttttgatctgaatgaaatgcctttaagcctttttttcttctttttttttttcaagtgaaaggcacagaaatgcaattacagtcctcaaagggttaaatttgacactaccangttctatgacctttattgncatggnaacttnaccattttagganggctttttatcattggtatttggggctttctttactgntaaanaatgtctctga

SEQ ID NO: 1526 - DNA, 351 bp, Homo sapiens
accaaatttaacttggcaaactttctattgcctgtcccatgtgcatcttatttaaaatttcccccatggaaatcactctcctgttgactatttccagagctctaggtgtttaggcagcgtgtggtgtctgagaggccatagcgccatcatgggctgatttttattaccaggtcccccagaagcaggtgggaggctctgcttcctgctgccgctctgcagcctggacctgtggaccctggttgtaaagagtaaattgtatcttaggaaaccagtgtcaccttttttttcaccttttaattttatattatttgcgtcatacatttcctgtaacggaagtgttaattttactgt

SEQ ID NO: 1527 - DNA, 466 bp, Homo sapiens
acaataaaactgttgtcagcttttgttttacagagaacgctagatattaagaattttgaaatggatcatttctacttgctgtgcattttaaccaataatctgatgaatatagaaaaaaatgatccaaaatatggatatgattggatgtatgtaacacatacatggagtatggaggaaattttctgaaaaatacatttagattagtttagtttgagggagaggtgggctgatggctgagttgtatgttactaacttggccctgactggttgtgcaaccattgcttcatttctttgcaaaatgtagttaagatatactttattctaatgaaggccttttaaatttgtccactgcattcttggtatttcactacttcaagtcagtcagaacttcgtagaccgacctgaagtttctttttgaatacttgtttctttagcactttgaagatagaaaaaccactttttaagt

SEQ ID NO: 1528 - DNA, 213 bp, Homo sapiens; identical to SEQ ID NO: 1431

SEQ ID NO: 1529 - DNA, 321 bp, Homo sapiens
actgaatacttcggcaaacttattgggtcttcattttctgacagacaggatttgactcaatatttgtagagcttgcgtagaatggattacatggtagtgatgcactggtagaaatggtttttagttattgactcagaattcatctcaggatgaatcttttatgtctttttattgtaagcatatctgaatttactttataaagatggttttagaaagctttgtctaaaaatttggcctaggaatggtaacttcattttcagttgccaaggggtagaaaaataatatgtgtgttgttatgtttatgttaacatattattaggt

SEQ ID NO: 1530 - DNA, 257 bp, Homo sapiens
actcgatgtttttaaatgtatttctaataattattagtagggtcacacctatttgacagcttttttaaaaagtcacatattgctgtatttttaaagatgacaaacctttatttaaatgagatgcttgctggagattttctttttcaaactcactttttaagttatggaaataatatcactgctgaaagtttggaaaacatatataagggtgccaaaaataccactaaaatcacataaaccaatcttaccattattaa

SEQ ID NO: 1531 - DNA, 96 bp, Homo sapiens
accagttaacaagctcgctcctctttaatgctgactcgtcctcttcttcttccacctttctgaggtgaagcacaataaggttagagattcggcagt

SEQ ID NO: 1532 - DNA, 293 bp, Homo sapiens
accattatggtttccatatggtaattacattggaaagttctgcaataagattctagttctctcttttctttaagcttatggttgaaggttaaccttgtttgtgcagattaccaaattactgctgatgtagtatgataaagtcagcttcttggatacagacacacccagggcagctgccaatcagaaatgcaaattgctaaattccaaacagaaccagtgactttgctgctacatatttactaaattgaccactttgattcttgcttgtttgtctcagttatagggagttttgt

SEQ ID NO: 1533 - DNA, 421 bp, Homo sapiens; identical to SEQ ID NO: 1179

SEQ ID NO: 1534 - DNA, 572 bp, Homo sapiens
  misc_feature 112, 182, 186, 193, 249, 547: n = A,T,C or G
actgttcctgttggccgagtggagactggtgttctcaaacccggtatggtggtcacctttgctccagtcaacgttacaacggaagtaaaatctgtcgaaatgcaccatgaanctttgagtgaagctcttcctggggacaatgtgggcttcaatgtcaagaatgtgtctgtcaaggatgttcntcgnggcaacnttgctggtgacagcaaaaatgacccaccaatggaagcagctggcttcactgctcangtgattatcctgaaccatccaggccaaataagcgccggctatgcccctgtattggattgccacacggctcacattgcatgcaagtttgctgagctgaaggaaaagattgatcgccgttctggtaaaaagctggaagatggccctaaattcttgaagtctggtgatgctgccattgttgatatggttcctggcaagcccatgtgtgttgagagcttctcagactatccacctttgggtcgctttgctgtttcgtgatatgagacagacagttgcggtgggtgtcatcaaagcagttggnacaagaaggctgctggagctggcaa

SEQ ID NO: 1535 - DNA, 306 bp, Homo sapiens
acctgcgtttcctgcgctctgcggagttcttcaactacactgtgcggaccctgggcctgggagaggagtggcgagggggtgatgtggctcgaacagttggtggaggacagaaggtccggtggttaaagaaggaaatggagaaatacgctgaccgggaggatatgatcatcatgtttgtggatagctacgacgtgattctggccggcagccccacagagctgctgaagaagttcgtccagagtggcagccgcctgctcttctctgcagagagcttctgctggcccgagtgggggctggcggagcagt

SEQ ID NO: 1536 - DNA, 547 bp, Homo sapiens
  misc_feature 485, 500, 543: n = A,T,C or G
acaaaatgaaatagacagacttaatgaacaagccagtgaggagattttgaaagtagaacagaaatataacaaactccgccaaccattttttcagaagaggtcagaattgatcgccaaaatcccaaatttttgggtaacaacatttgtcaaccatccacaagtgtctgcactgcttggggaggaagatgaagaggcactgcattatttgaccagagttgaagtgacagaatttgaagatattaaatcaggttacagaatagatttttattttgatgaaaatccttactttgaaaataaagttctctccaaagaatttcatctgaatgagagtggtgatccatcttcgaagtccaccgaaatcaaatggaaatctggaaaggatttgacgaaacgttcgagtcaaacgcagaataaagccagcaggaagaggcagcatgaggaaccagagagcttctttacctggtttactgaccattctgatgcangtgctgatgagttangagaggtcatcaaagatgatatttggccaaacccattacagtncctc

SEQ ID NO: 1537 - DNA, 270 bp, Homo sapiens
  misc_feature 15, 16: n = A,T,C or G
acaatgctaattaanncccaatctacaggtttaccacctttgtgggctaattagcttccaatagaggagaatctcatgtttccatagctataaagtgcaccccttatccctgcgaacctcttcacaaatgtgctgttggtcataagggggacagtttgagactatggagtgctccatgaatagaaaagcagttcaaagcacgtgtctcacactcacggagtcagcactgcctccttcacatacgaggaacagtgtagtcattcttaatgt

SEQ ID NO: 1538 - DNA, 210 bp, Homo sapiens
acgtgccaagcatcctcgtgcgaccgcgagagcccggggagcgggggcttgccggccgtcgcactcatttacccggggacagggagaggctcttctgcgtgtagtggttgtgcagagcctcatgcatcacggagcatgagaagacgttcccctgctgccacctgctcttgtccacggtgagcttgctgtagaggaagaaggagccgtcgg

SEQ ID NO: 1539 - DNA, 232 bp, Homo sapiens
acgcaatcttaaagagggagtaaggacaggaattcagggcagggctctggcagttacggtcaactaagttgtagaggtttcagcgactgcggtcagatagacattagacgtcgtcagttatcgcttctgacggcacttcccagttctctcgggtttgcacacccccactgtgggccggggaaccgggtcccggccttcgcagactccaggctctggcagatgtggccctcca

SEQ ID NO: 1540 - DNA, 581 bp, Homo sapiens
  misc_feature 522: n = A,T,C or G
actcttgtccacagcagagacattgagtataccattggcatcaatgtcaaaagtgacttcaatctgaggaacacctcggggtgcaggaggtatgcctgtgagttcaaacttgccaagcaggttgttatcctttgtcatggcacgctcgtcttcataaacctgaataagcacaccaggctggttgtcagaataggtagtgaaggtctgtgtctgcttggtaggaatggtggtattacgcttgatgaggacagtcatgactccaccagcagtttcaataccaagggaaagaggagtgacatccaagagcagcaaatcttgaacattctcagacttgtctccagacaagatggctgcctggacagctgcaccataagcaacagcttcatcagggttgatgctcttattcagttcttttccattgaagaagtcttggagaagcttctgaatcttggggatacgagtagaaccaccaaccaggacaatatcatgaatctgtgacttgtctagtttggcatctcgaanggctttctctactgggtccagggtgccacggaacaggtcagcattcagttcttcaaatc

SEQ ID NO: 1541 - DNA, 333 bp, Homo sapiens
  misc_feature 45, 47, 90, 170, 171, 264: n = A,T,C or G
acgtatgtggcatttccaggtatgactgagtgtgagagacatgtnanaggctcttcagtgatttcttgctattgaccgatgcttcactgngccaaaagagagaaaaaaatgttgggttttgtaattaaattatttatatatttttgaaacccgaattgaaaatgttgcanncaacgggctacagctttattagtggttctctaactgtggtctccttgggccaagcaatttctttaaaggaaaagttgattatgtatgtggggngccaggaccactgccttgaaagcaagtgtgatttttatttttaatattattttatttgtgtctgtgtac

SEQ ID NO: 1542 - DNA, 136 bp, Homo sapiens
accttagagttcctggccagagttgactctaggtagtgatgtgattttcttgggatgtttttctaaatattcttttatgctaaagcacatggcttgatacttctgttgattaagctcgtgtctacttacagtcatc

SEQ ID NO: 1543 - DNA, 401 bp, Homo sapiens
acatattaagataaatgtcatgtgtaagataactgataaatattggaactttgctagaacaagaccctgtagtaatagtaataatagttgaagtttggccaactcttaataaagttattttggtaactaatgttttatggcacttaagaataattagcagcgttaaattttgtttgtattaagcacttttaattttatccttcctaaaaatagtttattgtatctgacaagaaacttacttaaccattgtgtccttcccatcttttttgtcatctttgttttcttcaaatgccctcctcccatctgccttgagattccctcgtcttcacttaaaagccagagtgcaagtcatgatttgcgggagggctcttgaaccacttctggctgcaccacaattctgt

SEQ ID NO: 1544 - DNA, 291 bp, Homo sapiens
acatcggtctggccgggctcgccactgacgtccagacagttgcccagcgcctcaagttccggctgaacctgtatgagttgaaggaaggtcggcagatcaaaccttataccctcatgagcatggtggccaacctcttgtatgagaaacggtttggcccttactacactgagccagtcattgccgggttggacccgaagacctttaagcccttcatttgctctctagacctcatcggctgccccatggtgactgatgactttgtggtcagtggcacctgcgccgaacaaatgt

SEQ ID NO: 1545 - DNA, 259 bp, Homo sapiens
  misc_feature 220: n = A,T,C or G
gaaataccttaggccttcagtcaattccgaagctccttcagttgtttttataatgggcgttttcacatgcacatatgtgtatgcatgtatacgcccatacagacatgcacacacagactcctactccattagctaacataccctccctctccacaacccctgtcacatacctttcaggaggtgacagttgtcttagttgtcatctacccagacaaacgtnctgggcccgtcctccctcctgatactgtagcctcttggt

SEQ ID NO: 1546 - DNA, 412 bp, Homo sapiens
acacagtcaagctttaaagaaagtgtttgctgaaaataaagaaatccagaaattggcagagcagtttgtcctcctcaatctggtttatgaaacaactgacaaacacctttctcctgatggccagtatgtccccaggattatgtttgttgacccatctctgacagttagagccgatatcactggaagatattcaaatcgtctctatgcttacgaacctgcagatacagctctgttgcttgacaacatgaagaaagctctcaagttgctgaagactgaattgtaaagaaaaaaaatctccaagcccttctgtctgtcaggccttgagacttgaaaccagaagaagtgtgagaagactggctagtgtggaagcatagtgaacacactgattaggttatggtttaatgttacaaca

SEQ ID NO: 1547 - DNA, 204 bp, Homo sapiens
cctttaggaccttgacagacaaatcgattacaaggtcaattcccaggatttcttcagggtgtgttcaggagtgtagatgttctttggatgacctttctactaaattagacctctgaaggagaaagctacttgccagaggctttccctgagagcattaggttggacaaaatctgactaaaatttaattactaaatgaaagtgtgt

SEQ ID NO: 1548 - DNA, 474 bp, Homo sapiens
acttatttcaacaattcttagagatgctagctagtgttgaagctaaaaatagctttatttatgctgaattgtgatttttttatgccaaaatttttttagttctaatcattgatgatagcttggaaataaataattatgccatggcatttgacagttcattattcctataagaattaaattgagtttagagagaatggtggtgttgagctgattattaacagttactgaaatcaaatatttatttgttacattattccatttgtattttaggtttccttttacattctttttatatgcattctgacattacatatttttttaagactatggaaataatttaaagatttaagctctggtggatgattatctgctaagtaagtctgaaaatgtaatattttgataatactgtaatatacctgtcacacaaatgcttttctaatgtttttaaccttgagtattgcagttgctgctttg

SEQ ID NO: 1549 - DNA, 394 bp, Homo sapiens
acgcgaaattgtgttatgactgatagccttcagctacaaaaagataggactgacctggtttaaagtgttctattttgtaaatcattccatttgagtctttctgatgaacttggctatactgaaatctgttattttagtgaggctccaaaatgagcaaagctaggcctgattagagtagagtgactattaaaaaacataactttctaggagctataaatcaaagttttaaaaagatgtttggatatatttgagtattccgatcatgaaaacagaaattgccctgcctactacaaggacagactgatgggaaattatgcacctggtcaacttagcttttaagcagacgatgctgtaaaaactaacggcttctctgatatttattgtaagttttagt

SEQ ID NO: 1550 - DNA, 572 bp, Homo sapiens
  misc_feature 563: n = A,T,C or G
acagttaattagctcctgaagacaagttagtccaacctcaaagcacaggaagttgcacagcaggtgggggaaaacccagctactcacagttgtccacaaggggttagtggcctgaggtggtccttaggcaggagccacctgtcccacccattcacttgtcctgcctggccctagccctgaacaactgcaatgcagcacctctggaagtggcacattttatttcttttctaaacgctgagttgtcagggataaattttcaatagaaaaatctttcccacctgctgataatactttggtttttttgttttcctaaagataaagcctggagtcagcaaaatttgcttgcatgataagctagttgctttggaacaaacagaaggttgccgggtatttcttggagtagaattttgtagcctgccagactgagtttctcactggcatcaaacacacacttcatcataagggcggcaaagcccaagaattgaaacccacttgactggaaataccaggacccgaaggtggagagccaccctggaggaccacgtggtctgcaatgagctctncagtcaccc

SEQ ID NO: 1551 - DNA, 517 bp, Homo sapiens
  misc_feature 145, 274, 308, 330, 331: n = A,T,C or G
accacgaagtcaatacttctcagtgagtagggaaggcaaaatacttcctcaatagcagggaaaaaaaagcaagagaaagactgaatttagaaaaaaaagacaactgttaaagaaaatgtttaagtcaacttttttttttttttanacaaggatattgcaactatcacttaaagtctggtggcacattctttagtaggtccttaaggcaatatatttaaattaatttacaatttgatttgatgttaaagtttttttaaacatcacctcaaaatanatgctcaaaataatgccctcacaatagcctttgntaaaatgtattcagaatgtttnntaaaaaataatgggtggctttatattacagtagtgctcattagcaccactataattaagggtctaccaagtttccagcaaaaccacctgtttcttaggagtttcaccataaaagatcacattggctttaaccagttgggtagcgcacaaaaaagcaatttttatcagttgctggtgctttttttgt

SEQ ID NO: 1552 - DNA, 397 bp, Homo sapiens
accgtcagcatccacagccatacatcttccctgactctcctgggggcacctcctatgagagatacgattgctacaaggtcccagaatggtgcttagatgactggcatccttctgagaaggcaatgtatcctgattactttgccaagagagaacagtggaagaaactgcggagggaaagctgggaacgagaggttaagcagctgcaggaggaaacgccatctggtggtcctttaactgaagctttgccccctgcccgaaaggaaggtgatttgcccccactgtggtggtatattgtgaccagaccccgggagcggcccatgtagaaagagagagacctcatctttcatgcttgcaagtgaaatatgttacagaacatgcacttgccctaataaaaaat

SEQ ID NO: 1553 - DNA, 263 bp, Homo sapiens
actaattaaggtattgaatttactgggttttagaaggctttaaaaaaaatccagataaatcaacaacaaaaatacagctcaactttgaactgcattaaaatccagaatctctcattttagatgaccattccttattcccctcaaaaggtttccaacagaagctatttcacaaactgattattagaatgtcttctccccactctccccaaaagcaagtatgcatggaagtgcatgcttttaaccttaagaaatgtatttttggt

SEQ ID NO: 1554 - DNA, 513 bp, Homo sapiens
acattatctttaaggggttttctttttttcttcaatagatatcccaaatatacacacaatcctatttatttgggtctaggatgtaaatataatttaactgtgtgctaagtgctttaggtaacacaagcatttatctattgtaaaatgaaaattcaattgccatcaaataagaattttgatttcagtcagaaatgcaataaattatgccataaggaatatatttgtatacattttgtctcagatattttctcatgtggtattgtgaagggtaacaagtataatattatctgtaaagaatttaaaaaaatatttttaaatataactaatagtatatactgattttgacagttttctttccagaactcaaaacgaaagctatttttaaaaattaggtgattttgataactattaaactttaatcaatgcattaagaaacaggcagctggcgatctaatgcataagttgctctttccttactgtatttttcagaccacttgcgagtcagttctaggt

SEQ ID NO: 1555 - DNA, 211 bp, Homo sapiens
actattttaaggagctatctgtttatgtagaatgattttgttaagagtaatgtaaactattattgagtagaggcctaaagaggactgtgcatttttgctatttaaaggaatcacaaatgatcatacttaagtgagcaaaaatgacaagttttactagctaagtagagaaataaatctcaaatgcagcgctacaattttcattatcttaagc

SEQ ID NO: 1556 - DNA, 303 bp, Homo sapiens
gcaaacttgcactttcatttgctaatataaattcagttttattttaccattttagagactactaatgattaaatgtagaaggagagggtgcacatgtttttatgtggagtgtttaaaagataaatttataccactgtaatgtgcagcttttattaaaagagaaattggttgaactgctaggttgaatgagagacttcatctattggactattttttttaatccaggcatatggtctttagtaatggcttgtaatttgtgaaaacattaatttgggggttttccctgttttcagttgtccatgt

SEQ ID NO: 1557 - DNA, 133 bp, Homo sapiens
acccatgtagactagcaaaatagtatgtagatgtgatctcagttgtaaatagaaaaatctaattcaataaactctgtatcagcccccaaaaaaaaaaaaaaaaaaaaaaaaaaaaaaaaaaaaaaaaaaaaaa

SEQ ID NO: 1558 - DNA, 505 bp, Homo sapiens
acaattccagcagggaaggagctcaacactgaattctaaagctatgcacttgactgttttctttctccttgaccttttcatagcaggggtgaacaactggatgctgaggaggaaaaaactgggcaaattaaaggggaatgagcttcagaccccatgcagagctggctgtgagtccgggtttcactgctcaccagctgcatgaccttgagcatgtgacttccccactctgagttgcggtggcttcagtgcaacacctgggtggcggttaaaaacctcgtgatccacaaatgaaggcccttgttattagttggcaaaaaattaaggaaaaacaaagaacaccatggccttgaagagtgttgggcaggagactgctcctcctccggaggaaagtgaagacaggaggctgtcacatcgtctctgacatggagagtggcttccgggccatccgtaggggaaggacacagagctcttgagcccccttctagattcaaggttggcgttttac

SEQ ID NO: 1559 - DNA, 574 bp, Homo sapiens
  misc_feature 505, 519, 520, 527: n = A,T,C or G
acaggcgaagtgttctattgcatcacaagtgctagtgatgcagtaacagatccaagggcataatattaaatatgtttttttccaactgcgatttagttgaaaaataacataatacaaacatatattaatggctatcaagaccagcagtgatctgcagaatacctagaggcctacctaattagaaggttgaaacttagtaaaaccgtattaaagtcagtgtttttattcttagattaacaatgacagagtgagatatctttgattacaattttataaggtgtggtggggaattgagaggagacagatattggggaagactggcagtgtgtgctgagttagagtttgggaatgtggctcaaattagtcaatattgattaggatattgttttagaaaattttaaatgtgtcctaaattgtggcatattgaaaacgatattaaggaacaatgactcattagccctaaatacaatttaatgagtgccatcaatgggcttaagaaataagnagggatgggggatnnccgaggnaaaatgaggtgaaagagaaaatggaaagtggaaaatatgtttgaaca

SEQ ID NO: 1560 - DNA, 413 bp, Homo sapiens
acctatttgacttaccatggagttaacatcatgaatttattgcacattgttcaaaaggaaccaggaggtttttttgtcaacattgtgatgtatattcctttgaagatagtaactgtagatggaaaaacttgtgctataaagctagatgctttcctaaatcagatgttttggtcaagtagtttgactcagtataggtagggagatatttaagtataaaatacaacaaaggaagtctaaatattcagaatctttgttaaggtcctgaaagtaactcataatctataaacaatgaaatattgctgttatagctccttttgaccttcatttcatgtatagttttccctattgaatcagtttccaattatttgactttaatttatgtaacttgaacctatgaagcaatggatatttgt

SEQ ID NO: 1561 - DNA, 549 bp, Homo sapiens
  misc_feature 536, 541: n = A,T,C or G
acatggcaattagaagttgtcatggcaaaagaaaaccacagctggcctgccacagccaacacaagaaccagaaaatggtagatgaaatgaaggaataaaggtggggtttattccttattataaaagaaaaaaaataattcttcagcagtcttaacaaagacatcaagatacaaaattacaagtgttttgactccagccctgtccccatctcctccaagagcagaggtaggagacagttgaagcaaacaagcaattctgtaaaaattacctagaaaccctacaaatttgattaaaatctaaacttctataattttgctttttaaaaaatttaatatcaaaaggcctgctttagtgacatgctattcctaccagaaaataaccccaataccccctctgtcagtaacatgctcaagttgaccagccaactcttatctctaaacctatgtggacaagtgtgtcttttaaaccaaagccacggagatcaagtgactgctagtaacgtgtcgtctgttaactaatccagtgcccaccttctncaganggtgggca

SEQ ID NO: 1562 - DNA, 522 bp, Homo sapiens
actgctcggaggttgggttctgctccgaggtcgccccaaccgaaatttttaatgcaggtttggtagtttaggacctgtgggtttgttaggtacagtggcaagatcacacaatcttagcgcactgaagcctcaaattcctgcactcaagcctcagcttcccaagtagctaggactacaagcacatgccaccacacccagctaatttattttttgtagagatggaggtcttgctacacttcccaggctagtctcaaactcctgtcctcaggtgatcctcctgcctcggtctcccaaagcactgggattacaggtgtgagccacagtgcctggccctcttaccagattgtttttgttttgttctatttttctgtttgttttttttaatgacagtttatatggtcaaaggaaacatggacctttctatatatttgtctttcaacttctctatattgctcaatattacatattaaattatattcctttaaatatttctcatcctttaataatgaggatgctaattaa

SEQ ID NO: 1563 - DNA, 346 bp, Homo sapiens
acgctgaaacacacacatgtaacagctattaggacactgtaaccgtcctctgtgtattttaaggccaatagtaacagagaggagggaaaaaaataactaccaagaaaataaaactaatgggtagattcacactaagaaaatctaggtaattatataaattcattgttatgaggttgtagaaaggacagttatctcacgacatatggaaaattggtgaatttcctgtgagactatgatttatgcttttgtgaatgtatacctgatctaaaaataaatgttttgtctaattttagacaaaacatttatttttagacaccaactaattggaaaatataaggaaagaaat

SEQ ID NO: 1564 - DNA, 215 bp, Homo sapiens
actacaagcccaccaagctaaagaggctgcccagaaagcagttaacagtgccaccggtgttccaactgtttaaaattgatcagggaccatgaaaagaaacttgtgcttcaccgaagaaaaatatctaaacatcgaaaaacttaaatattatggaaaaaaaacattgcaaaatataaaataaataaaaaaaggaaaggaaactttgaaccttatgg

SEQ ID NO: 1565 - DNA, 562 bp, Homo sapiens
  misc_feature 522: n = A,T,C or G
acagattgggcggaatgtggagaaggttggccacagtccagagccaggagcccatggaacaacttggaaggtgactcaggtgaggctgtcaatgagggaatcccgcatgctggtggcaatggtgctaggctgggcttcattcagcttgaagacactctccaccactgacagctctgtgctggttgtgtccaggccacagaaggcacaccagtcattcaccaccatcccagcagcaatcacctcactgcctcggttcacagtccccgccacaagggggacttgaagaagagaggacagctcatcctggtcttcaattgaagtcttgggatacaccagccctccctgattgctgaagacacagtagcttcctactagcacctggtcgaccactgtctgtctgaagacttccaccttgagcacatctgccagaatttcttctgtctccctgtccaagtctgggtggaccaaggccacgtagtcattgcaggtggtgacattgcccaaggctgagagccgctcctncacccgcctaatctgcactgtgtctgggaggctgttgcga

SEQ ID NO: 1566 - DNA, 147 bp, Homo sapiens
acctaagtggtgtgatgtaaatactggaaacaaaaacagcagttgcattgattttgaaaacaaacccccttgttatctgaacatgttttcttcaggaacaaccagaggtatcacaaacactgttactcatctactggctcagactgt

SEQ ID NO: 1567 - DNA, 339 bp, Homo sapiens
actcactgttcttcataaacaccagctaaaaactggtataaaaaaaaagaaaaaaacccccaaatcatgggattcatacaaagatgactgagtgggggcaaggaagactcaacctaaccagcattttaccaaatctgtcatgtttgaatcgtgagagctccatggaagaaaggagatgctaagtagcgcttcaaagcttcagaccacaaccaaaacacagcaccatttcaaatagaagcagtagccaaacactgctcactttgatatggttcaaggatgctgacatcaatatttatctgctcattcatccaggaagaaggggacatcagttactactgt

SEQ ID NO: 1568 - DNA, 337 bp, Homo sapiens
acaccacctccaaaaataaaaaatggaaaacacacctttagtgaagtagaagtatttgagtatcttgatgcagtaacttatagttgtgatcctgcacctggaccagatccattttcacttattggagagagcacgatttattgtggtgacaattcagtgtggagtcgtgctgctccagagtgtaaagtggtcaaatgtcgatttccagtagtcgaaaatggaaaacagatatcaggatttgaaaaaaaaattttactacaaagcaacagttatgtttgaatgcgataagggtttttacctcgatggcagcgacacaattgtctgtgacagtaacagt

SEQ ID NO: 1569 - DNA, 574 bp, Homo sapiens
  misc_feature 502: n = A,T,C or G
acaacactgactgctcagacacatttaggttcagggtggacctttatgtcttgtcaagatgcctaggcccggctgggcgtggtggctcacacctgtaatcccagcactttgggaggccgaggcgggcggatcacgaggtcaggagttcgagaccagcctgaccaacacggtgaaaccccgtctctactaaaaatacaaaaattatccgggcatggtggcacatgcctgtaatctcagctactcaggaggctgaggcaagagaatcgcttgaacctgggaggtagaagttgcagtgagccaaaatcacgccactgcactccagcctgggcaacagagtgagactccgtctcaaaaaaaaaaaaaaccggatgtctaggccaatgataattatttttgatgcagtgtggattagttcttttgttaaccccactgtcttggggaatgatgccagctgggaaattgagtttttgactgaaacatggagccttcactgctttttttntggttcctatgaagatttggaacatagaaaacacaaaaacttaccttaaaatttgagcaggtcgttgatggc

SEQ ID NO: 1570 - DNA, 599 bp, Homo sapiens
acaccaccataccttttcccagaatacccagaagcaagcaagaatacaggtcagaatagggaggtttcaattctgtatccaggggccaaagaccaacgccaggggtccctgcttcctgaagaattagaagatcagatgccaagattggtggcagaagaatctaacagaggtagcacaaccataaacaaagaagaagtcaacaagggaccttttgtagctgttgtgggtgttgccaaaggtgttagagattcaggagctcccattcagctgatcccttttaacagagaggagcttgctgagagacgaaaagcagttgaatcctggaacccagtgccttattctgtggcctctgctgcaatccctgctgcagccattggggagaaagcaagaggctatgaggagagcgaaggtcataatacaccaaagttgaagaaccagagagagctggaagaattgaagagaaccacagaaaaattggaacgtgttttggctgaaaggaatttgttccagcaaaaggtggaggagctggaacaggagaggaatcactggcagtctgaattcaagaaagtccaacatgaattggtgatctacagtacctg

SEQ ID NO: 1571 - DNA, 122 bp, Homo sapiens
  misc_feature 28, 96: n = A,T,C or G
actatagggtaaatacgggccctatttnaaagatttttaggggaattaattctaggacgatgggcatgaaactgtggtttgctccacagatttcanagcattgaccgtagtatacccccggt

SEQ ID NO: 1572 - DNA, 262 bp, Homo sapiens
acttaagtcctagatgtccaagaaagacagtatcttgtctcagagtttacaatcctggggaagagacaggtgatgaaacagcctgacagacccaaatgtatttcagagacaatcacaaggtgtaaggtgcagataaaagaggcatctaagacctgtggaatttggcttcaccaaataactgggtatttagttaaaacataaatgcccttgtggctatggtataactttttgtaatatgtccagcacaccaatcacatactgt

SEQ ID NO: 1573 - DNA, 619 bp, Homo sapiens
  misc_feature 497, 501: n = A,T,C or G
acaaattcaagtgcggaattattacgccattttaagtattatctacttttttaaaaaatcacagtggtcttcatcacatggcgaaaaaacaaacttcactcttctccaaagggataagtccatcctaaatgtaactacaaacaattgtataaacctttatagtttttccccctaatctactaaacatattccagtgtcatttagtagttttacatagaatctgcactatacttggatactcagggaaaataagatgacatatattgtagttttagaacgcaaaagagctttcattttagacaaatatacaacatagaagccactaaaaaatatgggtctattaatcaagagcccatttcaaaatgataagagcatttagtatgtagatctggaatgcacagtttctggaagtattagaacttagtgttaaacagtgcccttataccctcttctaatactgtagacacctaccaaccagatttgatttcccctaattntatnatttccatcagaaaaccaaaaacagattattggggatccacctgtaactgaccagagcaaaaagtttttaagacttccgtttgtgtgttgcaacttttacattcaaaaccagatctct

SEQ ID NO: 1574 - DNA, 214 bp, Homo sapiens
actacaagcccaccaagctaaagaggctgcccagaaagcagttaacagtgccaccggtgttccaactgtttaaaattgatcagggaccatgaaaagaaacttgtgcttcaccgaagaaaaatatctaaacatcgaaaaacttaaatattatggaaaaaaacattgcaaaatataaaataaataaaaaaaggaaaggaaactttgaaccttatgt

SEQ ID NO: 1575 - DNA, 98 bp, Homo sapiens
  misc_feature 64, 84: n = A,T,C or G
acaagcttttttttttttttttttttttttttttttcttttttttttttttttttttttttttngcccaaaaacttccattgtnttaatcaggagtta

SEQ ID NO: 1576 - DNA, 419 bp, Homo sapiens
acctctacagagaccaaaactcattctcttaaagagattttatggggctactgcagataaaaataggacacaatattaaaggagctacagaaggaagggagtcccatctcaaaaaaaaatgaatgtatgccactgcaattagagtatccaataaaggagacagtttagagtcaggacagaaaagcttccataattgaactagattacataatagtatttctagaaaaagagatatttttagattgtatgccacttttgtttaagaactgtgctgtgatcactgtattaattttggtttatcttggcatatatccttcagtttgtttttatttttaatttttcctttttttccgattaggctttggtcagcatttttcatttaaagaaaagtaacactcccatccactcataagcttggt

SEQ ID NO: 1577 - DNA, 546 bp, Homo sapiens
  misc_feature 31, 345: n = A,T,C or G
accaactctaagccacactggactaattcanatggaggcatactttccaaactaatcagatgcctaataaagtgttggagtatacgtgtggacatgtagaagggatagttgcgaatgtctgaccttgtggaaatttccaaagatgtctacccataaacggtaattggcagtgttcatgactgaattaaatttagtcttttgaatcttgtcagacaaggatcccagagtgattctggcacatcactcttcttatggataatctacccacccagaagataaaaccctcagtaaatctgagatagtttttaaaattacaagaatatttagcaaacttcaagtgagtanagtatataaaaatgtaagctggaaaaagcagcctttgaaatgagacactagaatatctttggtagataaaaactctattatttcaaggagagagtttttgtttctggaaagtgctaagttgtgtaacataaaaggcattactaaattcaggtgacaggtaaaagaatattttttttaagaaataataaaccatgcatattg

SEQ ID NO: 1578 - DNA, 88 bp, Homo sapiens
tttttttataagattattagtataaaaggggagataggtaggggtagcgtggtaagggtgatgagtgtggggaggaatggggtgggtt

SEQ ID NO: 1579 - DNA, 334 bp, Homo sapiens
acacaaggtcccaaaaagcgagacctgccatgacaccattgctgtgattcacatgggaggtaataggattggatcggggtgacagtgatggaggtgatgagatgttgttgcatttgggtttatttttaaggtagaacaagatttgctgaagaatgagattttggtgtgaaagacagggattaaggatgactccaagtttctgggcctgagcagttgaaagtaaggaatggccattaactgagatgagaagactataggaagaatggggtttggttcatggaggaaggtcatgtttggtttggaatatattgaatttgagatacccattatctgt

SEQ ID NO: 1580 - DNA, 541 bp, Homo sapiens
  misc_feature 511, 524, 531: n = A,T,C or G
acatctgagtccaaagtgtatctgaatgtgtgctctgaccttattcttaaatgttttctccccatactttatagccatttattttttaaacaccttaagaaggaacgaaaaagttctcttggatgacgtatattcaagtctgagccaaattgaggattgtgtctaggaaatctgtaaagccatactactgtgttcattagcatgagcaatttaaaatgaaaatgaattaaaaagttaaacatgagtttggttttaattttggggggatcttaagatatatttctgggagtaggatagccactgaaaataattttgaatagatgataaagtacctgcccgggcggccgcccgggcaggtactgaccagcaaaatggagaagatcagagaatgcagcagcagttttttttcttgttttcttaccactttattctttcagagtttaaagaaaatggactcatgcacagaacactatgcattttgaaacttgttcatcctggatttttttaaatnatttttatctcanaacttanacaaaaatta

SEQ ID NO: 1581 - DNA, 352 bp, Homo sapiens
cgttgcgttccaaggcatctgtgagcccgcggagtatacaccatgagcaaagctcaccctcccgagttgaaaaaatttatggacaagaagttatcattgaaattaaatggtggcagacatgtccaaggaatattgcggggatttgatccctttatgaaccttgtgatagatgaatgtgtggagatggcgactagtggacaacagaacaatattggaatggtggtaatacgaggaaatagtatcatcatgttagaagccttggaacgagtataaataatggctgttcagcagagaaacccatgtcctctctccatagggcctgttttactatgatgtaaaaattaggtcatgt

SEQ ID NO: 1582 - DNA, 350 bp, Homo sapiens
ggttttaagaagaatgccattgaacacccagttcgaaccaatcagattccacgtcagattcctgaacagtcgttctacacgaagcccttgcctggtattatcatgggagggattttgccctttggctgcatctttatacaacttttcttcattctgaatagtatttggtcacaccagatgtattacatgtttggcttcctatttctggtgtttatcattttggttattacctgttctgaagcaactatacttctttgctatttccacctatgtgcagaggattatcattggcaatggcgttcattccttacgagtggctttactgcagtttatttcttaatctatgcagt

SEQ ID NO: 1583 - DNA, 366 bp, Homo sapiens
acagcttctcaaatcatgttagaagggtctcacattcaatgatcaagaaattttaaaatagcagtaattattttcattttaagaaaaggttccctttctcccctcccaccccaagtatttaacatgaaagaatgggcttccttacatattaattttatacttatttttgaagcagcaacaattaaccatcaatttggcatttctgtttacagtcgctacaaaaatttttttaatttcacaaagccattatccagtgttgccatgaaacagagactgtaaattctaggtagctaagattctttctgaaaccaatgttaagtcaaagaaatataaagcagggcattacactaagtttctggatctagt

SEQ ID NO: 1584 - DNA, 561 bp, Homo sapiens
  misc_feature 388, 406, 411, 503, 515, 517, 518, 547: n = A,T,C or G
acaaaatagctgcaaaccaagcatcagtcatttcacaccagcatctctccaaacaaaagcaattgtgaaaatgtgtttacttcagaacggcactacataaatgtgaaaagttgttgatcttgaaatatctcaggatagcacttttggcaaactcttagccaaggcttcttcattggtgctgttataagatggtgtcctattttcttgtttatacgttcattctgtttgttattgctactatgtaaaactttcacatgcaaccaatgtatatctgagtttgaagatgtttatatagggtattttttccaactgcccctgcattgtgcctgaaccaattgaatcttatgtatgagtttcatttgttttattaatgttaatttaaatctgnaaataattgctttattgngatgngatacagaacaaagtgttcgtttttgactgaaaatagtagatcagaaatctcagtttaatataaaatgagctaagttttttaaaaataaatnataaacttgganannagaaaaataaagcagttgctgtagaatangctgtatctttttc

SEQ ID NO: 1585 - DNA, 545 bp, Homo sapiens
gtagaagcaggaggttttcaacctagtcacagagcagcacctaccccctcctcctttccacacctgcaaactcttttacttgggctgaatatttagtgtaattacatctcagctttgagggcccctgtggcaaattcccggattaaaaggttccctggttgtgaaaatacatgagataaatcatgaaggccactatcatcctccttctgcttgcacaagtttcctgggctggaccgtttcaacagagaggcttatttgactttatgctagaagatgaggcttctgggataggcccagaagttcctgatgaccgcgacttcgagccctccctaggcccagtgtgccccttccgctgtcaatgccatcttcgagtggtccagtgttctgatttgggtctggacaaagtgccaaaggatcttccccctgacacaactctgctagacctgcaaaacaacaaaataaccgaaatcaaagatggagactttaagaacctgaagaaccttcacgcattgattcttgtcaacaataaaattagcaaagttagt

SEQ ID NO: 1586 - DNA, 541 bp, Homo sapiens
  misc_feature 261: n = A,T,C or G
acacaatggtttattaaaggaatgtatggcccacatcaacctagcaaggattctactggtaaaccttcctatggccaaaggaaaaacaagcaggagttgagtggctggggtggggtgcaggcaatggagagagggcagaagggtgtagaagctgaaggggtctagaagcttactcctgagtttcttccttctgtcttcaaatctttacttcttatggccaaagacccagcggtttcataggctggagatgcactcttctanactgctcgagacagccagagacaggggaggagggaagaaggatactgtggaaagggatggcggggcaaacatttagagctagaagccactactgggccaatgctaaagtttctgtctctaagcctaaaaaagccagtgtagtagggcccttatcactcttagtttgctaggtttcccctctgaaataatgagcagatttagccaggctagcagaaaggaagaggacggggctgtgcaggagttagcagaatcttgattcttgctctatggtcggtacctc

SEQ ID NO: 1587 - DNA, 374 bp, Homo sapiens
accttagagttcctggccagagttgactctaggtagtgatgtgattttcttgggatgtttttctaaatattcttttatgctaaagcacatggcttgatacttctgttgattaagctcgtgtctacttacagtcatctagtgagaacctgtggtgtggtgagatgataacttggtctttggtcttcatcatttgaactagttttggttttgtcttgtcccttccttgagcattttgtgtgtgtttaatcctatttggtaaatgaaccactgtgaaagaccaagttggagaaaacagaacacccccaaaacatttattttttttttagaaaatcatggctcactatggtagtatacaatattgttttcacacatgt

SEQ ID NO: 1588 - DNA, 556 bp, Homo sapiens
  misc_feature 443, 446, 470, 497, 499, 508, 527, 535: n = A,T,C or G
gaagcagagaatttggggcttctgagatggctggagtttgtggggcagaataagggggagaagaaaaaaagagctccagaaatctgcaaaaggttccccttaagtctttgatcaaatactaagcttgtagataacagcttacaaggcctagtagaaaagagctgcaaaggagaggtgaactggagattttatagattactaggagataaaagttctggacaagcgagtggaaaccttactgaactccttggacactccattgacatctcagaaagaccacagtttaggggtagggccaaagccatagagtaaaagctactctagacccaaactaataagcttaaaaacaagcctcaaaaggatcaaggtgatttgccagtattttgactgcttgtggaaacaaaactcaatatattctctaaagataataaaatctctatgtncanttatgtagcaactataatgttcancatgcaatgagaacttttctagatacncnaagaattangaaaatataggttaaaaanagggtggnaaaaaaccacaacagtcaaca

SEQ ID NO: 1589 - DNA, 510 bp, Homo sapiens
actttcaacacaccgtggacaggggaggaaatgggttctgcttgctgaccaccagcttctgatgctgatgcgatatgtagcctttgacgtgtcccatgtatatcaagttagccagaatacactgaacttcgtcaatgtccacgtcctccacctgcatgaacttcaaggcaaccagaaaagcatccagagacagctggtgtgttttcagtaacaaatacactttcttaaagaggttcctgtaggtgatgatcttcagcttctccaggatgaggaagattccgcagcgaatgaagaaggcctcgtgcttcgccagcgcctcgtgcagcagcagcaggttgccctcgctcacagctctggttacttccgcaaactgcatcaggtgatgctttttcaggagctccacagtgggcatgtgacccaatagcatttttactggaagcaaatagatcagaatcatccttttgttcttctgactagaacggtgacaatgctcaaaggcaaatgacaggt

SEQ ID NO: 1590 - DNA, 180 bp, Homo sapiens
actcacaggcttcttctgccagggacatccgttaaatattgttcccccaccactgagtcctggagctatagatggtcatgacagtgtggttgacaatgtctccagccctgaaacctttgttatttttagtggcatgcaggctatacctcagtatttgtggacatgcacccaggaatatgt

SEQ ID NO: 1591 - DNA, 261 bp, Homo sapiens
accctgaacggctgtgctctccacccttgtatcggtgagtggatcttgtctacatcagccgtaagcctagaagcagagcgggatcgaggcgtttttaataattcgagttgggaagacccggatggttcatcaaaatgatggtgttgagcacccgggaggcagacattgggtatttgttcacaattttgcacctgtaagaaaatgttcctttataactttcaaggattgccgtgagcgtctttggggccttttcattcatgt

SEQ ID NO: 1592 - DNA, 591 bp, Homo sapiens
actcctgccaaggcagctcccaccgctatgggcacaaggaagttgtcgtcatctgcactgcagtcttgagctgtagaatactttccttgtgtcacattgaaaggctgaacccttagatcaaaggtatttatctgaaatgctccagacactgaaacagtctgctctttgttgcacatataagaacttcccaggggggcatcccagtagctgagattgttatttgcaatgctgaaaacggagccattaaccaaatacatgctgatgttcacttccttcagataaaatcggttttcatttttcacagcaaagacaaagtctagatacttaatggtgctgctattgagtctaagtagagcagtgtgagaacggcagctgcctgtggagtgagttgtattggggttgatgttaataactgaagcaaccttatcctgagtgatgttcagctgcagccccatggtagccagcagacaagtatcattgccattattaactgaataggttccagcttctggtttttcctttggagtaggtgttgtagtaggagatggcacagtggtgtgtatggtgggtgccactgttgaagttttgtct

SEQ ID NO: 1593 - DNA, 358 bp, Homo sapiens
  misc_feature 288, 299: n = A,T,C or G
accctctttcccttcccaccccccaattaaaggcaaacaatggcactttgctcttgcttaacctagattgtcttcaaaaactattaaaatgtaaaagacttaacaaaaaaacaaaaagacgtttaacagatgtcaaaaagctccttagtgtttgaaaataaatgcttaaacaaaagacaacatattttatatcaaacaagtttgaagagccctgaattgcagcattctgtaacataaacaaacaaaaagctggtataggatttattgtcaaaggcagaatttcttcangcaggtaagtnaggaggtggtggttctttttcaggcattttcacggccatttcataggttggcaaaacgt

SEQ ID NO: 1594 - DNA, 257 bp, Homo sapiens; identical to SEQ ID NO: 1267

SEQ ID NO: 1595 - DNA, 257 bp, Homo sapiens
actccctgctgttccgcaggacctccaccttcgccctcaccatcatcgtgggcgtcatgttcttcgagcgcgccttcgatcaaggcgcggacgctatctacgaccacatcaacgaggggaagctgtggaaacacatcaagcacaagtatgagaacaagtagttccttggaggcccccatccaggccagaaggaccaggtccacccagcagctgtttgcccagagctggagcctcagcttgaagatgatgctcaaggt

SEQ ID NO: 1596 - DNA, 526 bp, Homo sapiens
acttaaaataatttcgtatattaatgcgcttttatttttattttttcttttaggaagctatcatacaaataatgaaaatgagaaagaaaattagtaatgctcagctgcagactgaattagtagaaattttgaaaaacatgttcttgccacaaaagaaaatgataaaagagcaaatagagtggctaatagagcacaaatacatcagaagagatgaatctgatatcaacactttcatatatatggcataattttgaatatcatggacaatatttagaacccaaattttggagtgcttgggcagaaagttgtaaagtttgtgctggagaaaggtttatttggactttgattacataaatattaaaatctctgccttaccttacaaaaacaactatattttgccaatcacattagttagcatgatggcattcccttcatgttgcacactctttgacagcatgctgttttgtggagaaacttgcattcatgaagagcccattatcaacttttaaaagtgaatttgatttgt

SEQ ID NO: 1597 - DNA, 255 bp, Homo sapiens
actatatctattgcgccaggtttcaatttctatcgcctatactttatttgggtaaatggtttggctaaggttgtctggtagtaaggtggagtgggtttgggggaaaggaaaaggcttaccaggctgctatggtcaactcttcagaaattttcagagcaatctaaaagcgccaaaattcgctatgtttacagtgatactattaagaaaatgaatgtgattctgctctgtctttttaggtatgatcaaataaaaaat

SEQ ID NO: 1598 - DNA, 250 bp, Homo sapiens
acccatattgttaatgctaggatcaagataccacatagccagaacaagaagttgaaggtaaacatagaatattttatacaggcactcacacctgccatttcggaaaaggattaggaatccagatgccgtgaatttaactattcgttacaggcttgtcctgcaatatgctctggagcaacttgcctgcagagatttctgtatccacggacatttaaatatcgcaaaggctatctccaggcaagtatgttcc

SEQ ID NO: 1599 - DNA, 443 bp, Homo sapiens
  misc_feature 373, 414: n = A,T,C or G
acacactatatttacatcacccaccctgaaaacagcaggttctggcttttccgtgaacccccagatgaatataaattggagcctctgagaacagttccttccccagagcggggagtgtgcacgtgtgtgtgtaaccttctgattccatgggacctggccagcccctctggagccacacagcacctccttgccttacaccctggctccagcttcactggtccgggggacgcctcagcctggggcagctgtgatgtaaaccagttactccacctccatcttcctcttctgcaaagaatcgaggaagtcttgccactctgctgggtaaaagcgttttatagacgttgatcttactccgaatctgttttggggtatnttgatagtaattcttctcatcacgggccatggccttatagncctccccgtggttctctaccatgtagcgt

SEQ ID NO: 1600 - DNA, 201 bp, Homo sapiens
  misc_feature 12, 20, 72, 73: n = A,T,C or G
tttcctccaggntgtaatangcgtagaccttgactgctccaggctggataagctctacattaaagtattggnnaactttgaaagctagacagtcatcctcagagtgtgagaccttgtccaggtagatgatgagggtgttcctatcggagaaggctttgtccagctcatacttggagatgtatctgtcaacaccattggcca

SEQ ID NO: 1601 - DNA, 542 bp, Homo sapiens
  misc_feature 150, 303: n = A,T,C or G
accaaacgggcaaggacatctctacaaattactatgcgagtcagaagaaaacatttgaaattaatcccagacacccgctgatcagagacatgcttcgacgaattaaggaagatgaagatgataaaacagttttggatcttgctgtggttntgtttgaaacagcaacgcttcggtcagggtatcttttaccagacactaaagcatatggagatagaatagaaagaatgcttcgcctcagtttgaacattgaccctgatgcaaaggtggaagaagagcccgaagaagaacctgaagagacagcanaagacacaacagaagacacagagcaagacgaagatgaagaaatggatgtgggaacagatgaagaagaagaaacagcaaaggaatctacagctgaaaaagatgaattgtaaattatactctcaccatttggatcctgtgtggagagggaatgtgaaatttacatcatttctttttgggagagacttgttttggatgccccctaatccccttctcccctgcactgtaaaatgtgggattat

SEQ ID NO: 1602 - DNA, 94 bp, Homo sapiens
  misc_feature 2, 82: n = A,T,C or G
angcgtccttcaggtaatgaacttcagctgcagtgtgaaaggggcaggaagactggcagctgtcaaaactggaacagtccantgagtatgtgca

SEQ ID NO: 1603 - DNA, 378 bp, Homo sapiens
aaggagcctacaggccacttgaggaaattctctggttttgctgcagcttcgcttcaaacttccacagcagaagagttggaattctaatgccgcaatatcgttgtaataccagggattctctagaggcaagttaaggctttctgggcaaagaaaacaattccagatgatattgtgatagaatgctacagtgaaatgcttcttaatgactctcctgtcctgcctaaaggacaaagacctatgagtgacttcaacttgacgtgatgtttcagtgatctttacttcagctctaagtcagaatcaatgccacaggaaaagaaaagcttcttacatctcagacatctgcttgctgagcaaacacaaacaagaacacctgcccgg

SEQ ID NO: 1604 - DNA, 285 bp, Homo sapiens
acttctcatgagttatcactcagttttgcttctagagacccaccagtcaaagcagtaaaactaaatctccttaacaaaactgaagtcttcagaaaagcagtgctaaatgggtgatgaaaccttacttaaccactccctgtatgcaagatgacttattttgcattcctaaaacttctactttgattctcaatatatccgttttttttttctttttttcaaaagcattattttggtgaaaatcccaatatatgagtttaaaaaaaaatcattaacatcattaacagt

SEQ ID NO: 1605 - DNA, 546 bp, Homo sapiens
  misc_feature 19, 175: n = A,T,C or G
agcgtggtcgcggcgcgangtaccaattatatcatctcagtcttgaatttactcacgctgattgttgaacagataaatacgaaactgccatcatcatttgtagaaaaactgtttataccatcatctaaactactattcttgcgttatcataaagaaaaagaggttgttgctgtancccatgctgtttatcaagcaatgctcagcttgaagaatattcctgttttggagactgcctataagttaatattgggagaaatgacttgtgccctaaacaacctcctgcacagtctgcaacttcctgaggcctgttctgaaataaaacatgaggcttttaagaatcatgtgttcaatgtagacaatgcaaaatttgtagttaaatttgacctcagtgccctgactacaattggaaatgccaaaaactcgagtctttaattgtaatgactttgttttatccacagttaagccttttctcattacatatttatgtatttcactgtcatgtcaacatgtctgcagaatcactgtatgtaacaaacagccatattt

SEQ ID NO: 1606 - DNA, 582 bp, Homo sapiens
actggagatgtatttgataaccaaggttttaggtaaattttcaccagtattagttctatttgcaaactgaaaaatgttgtaggcttaatataaaataaccacattagtgaacattatatctcttagaagaaaggccatattttgctcctgcttctgtaaaaatattatttgtttgaaggggaaataatggtagtgtgacctttcacttaattcctactcccttaatgtgagagagacaaaatgagctgaagaaggaaaattctggagttacactccacaaccttgaacatactgacggacatctctgttttgacaacgatttctccatgccacccatgctctaatgccttgtggatcacggacaaccctctttgcacaagctacagcatcagcgatgttatcttgcagcaaagcactgcaggataaatgacaggcattaactgctcctggggttttgccatcattacaccagtagcggctattgatctgaaatatcccataatcagtgcttctgtctccagcattgtagtttgtagctcgtgtgttgtaaccactctcccatttggccaaacacatccagtt

SEQ ID NO: 1607 - DNA, 257 bp, Homo sapiens; identical to SEQ ID NO: 1267

SEQ ID NO: 1608 - DNA, 103 bp, Homo sapiens
acctgctttggcaatcattgcaactctgagattataaaatgccttagagaatatactaactaataagatctttttttcagaaacagaaaatagttccttgagt

SEQ ID NO: 1609 - DNA, 59 bp, Homo sapiens
  misc_feature 26: n = A,T,C or G
ggtgaagtaagcctgtgaaggaccancatgggaatcctatactctgagcccatctgcca

SEQ ID NO: 1610 - DNA, 445 bp, Homo sapiens
  misc_feature 21, 50, 58, 73, 86, 111, 292, 377: n = A,T,C or G
acagcgggttgaaacaatttntctaggtgagcacccctgtgacagagganaacaagtnactctcttcctcttnaatgattgcctanagatagcaagaaaacggcacaaggntattggcacttttaggagtcctcatggccaaacccgacccccagcttctcttaagcatattcacctaatgcctctttctcagattaagaaggtattggacataagagagacagaagattgccataatgcttttgccttgcttgtgaggccaccaacagagcaggcaaatgtgctactcagnttccagatgacatcagatgaacttccaaaagaaaactggctaaagatgctgtgtcgacatgtagctaacaccatttgtaaagcanatgctgagaatcttatttatactgctgatccagaatcctttgaagtaaatacaaaagatatggacagt

SEQ ID NO: 1611 - DNA, 313 bp, Homo sapiens
acttttctatgatgacccgggccgccttcttcacggttttggtgcgaacgcggcacgactgagcaccaggcctgagcgaccacctccctgttcaggcccagcctctggagttcattcctatcaatgtcattttgattgtgcagtaagatgaaaatttgtcattacaatagttacagtgacagagaaatgcacactatgaatcaaatagcaaggaaatgaagcaaattataacacagtgtggcaacgcacgagcaagtaaccattagagtaacattactttgtccagtaaatgcttcagttccaccacttgtac

SEQ ID NO: 1612 - DNA, 106 bp, Homo sapiens
  misc_feature 65: n = A,T,C or G
tacaccttggagtccaccgccaatataaataatacacatcacgattccatgatggtgcaacaatngcaatttaagtgaattcaacatttaaaccttttctgggcca

SEQ ID NO: 1613 - DNA, 503 bp, Homo sapiens
acacaacaacatttttggaaggacatataaagtgaatacaaccaaatatattaaaatggtttcaattaccagcattgaaacagtgcaaaaaaaagccaaatacaattgcacagatagtggactcccttagatcttgaaagtgaacttgattcctgacctctcccattgtcactccaagtgaaaaatgaaagcatggggcttttcttgcttcttggttagtatgagacattgtgttcatctgagagcaaaatcaacactagcatcacagcagaagtgcccatttcagcaaatccggtaaaaattgtaagttggcatcaagggaaccaatggataccttagggcactggcaattctcaatacatagaaatgcttgagggttgtgtcggttcccctggccacagtttgtcaggttgtttagccagatgccccattggtaaggtagactgaaatctcggtttagggctgaccccaaaagaaacagtctggttcgtgctttggtatgg

SEQ ID NO: 1614 - DNA, 81 bp, Homo sapiens
acttgtaattagcacttggtgaaagctggaaggaagataaataacactaaactatgctatttgatttttcttcttgaaaga

SEQ ID NO: 1615 - DNA, 185 bp, Homo sapiens
actgctacttagtttctaaggctgcacagggaagggaaagactgggctttggacaatctagaggtaatttatatccgcccccaggtggagcaacatgcgattctggaggcacgggggtaactgaaagtgagtaaaaaaaaaaaaaaaaaaaaaaaaaaaaaaaaaaaaaaaaaaaaaaagcttgt

SEQ ID NO: 1616 - DNA, 419 bp, Homo sapiens
acatttatttcctaatttatacatgatttttggtgttaatatatttaatgattaataacagaatgtttatttaatgtgctgtccatttttatgtaatattatggggaaagtgatgccagcagttccttttcattattctatcttctgtcatatgaatgttgagcaaagcttaggccaacatgaattgtttgtgaagtgtggttgatggtgctttgtttttttctgactacttctatggaaggccagtgaagaagcaaaggaagacatgaaaattgacgctcattcttcttcctattgttccctgacatccagcaaattgtgaatttgaaaaatgatggccagttttcagaagtgctgacaaattcatattggtatgcaaaagctcatcacccattaaggtttgttgttgaatcaacagt

SEQ ID NO: 1617 - DNA, 545 bp, Homo sapiens
gtcgcgcccgggagtccgccgcctgcaccaggatggagttcgtgaaatgccttggccaccccgaagagttctacaacctggtgcgcttccggatcgggggcaagcggaaggtgatgcccaagatggaccaggactcgctcagcagcagcctgaaaacttgctacaagtatctcaatcagaccagtcgcagtttcgcagctgttatccaggcgctggatggggaaatgcgcaacgcagtgtgcatattttatctggttctccgagctctggacacactggaagatgacatgaccatcagtgtggaaaagaaggtcccgctgttacacaactttcactctttcctttaccaaccagactggcggttcatggagagcaaggagaaggatcgccaggtgctggaggacttcccaacgatctcccttgagtttagaaatctggctgagaaataccaaacagtgattgccgacatttgccggagaatgggcattgggatggcagagtttttggataagcatgtgacctctgaacaggagtgggacaagtac

SEQ ID NO: 1618 - DNA, 107 bp, Homo sapiens
  misc_feature 13, 14: n = A,T,C or G
tttaaaaatactnngatttccttcatactgggccaggaatttgacgaagtcactgcagatgacaggaaagtcaagagcaccataaccttagatgggggtgtcctggt

SEQ ID NO: 1619 - DNA, 400 bp, Homo sapiens
acaagtccaaagtttcactgaaaggcaatagagaaagtgatggatttagagaagaaaaaaattataaacttaaagagactggatatgtagtggaaaggcctagcactacaaaagataagcacaaagaagaagacaaaaattctgaaagaataacagtaaagaaagaaactcagtcacctgagcaggtaaagtctgaaaagctcaaagacctctttgattacagtccccctctacacaagaatctggatgcacgagaaaagtctaccttcagagaggaaagcccacttaggatcaaaatgatagcgagtgattctcaccgtcctgaagtcaaactcaaaatggcacctgttcctcttgatgattctaacagacctgcttccttgactaaagacaggctgct

SEQ ID NO: 1620 - DNA, 231 bp, Homo sapiens
acatagatgttgaatgaatgcgcaaaggactgtgagagtccagtggaaggaggattctttgtctaagcggcagagaggggaaatgaccaggagaatgtatctgatttgggccttggaggataagtaggagtttgctggatggaggagagaaacttaggcaaagagaaaagcaataaaaatgcaaggaaagggtgcttggaaagggtggcttgtccagaggctgaagcaggt

SEQ ID NO: 1621 - DNA, 320 bp, Homo sapiens
acaccttgttggaggcttcagtgacgacaggcagttgtcacaaaaactcactcatcaacttcttagcgaatttgacaggcaagaagatgacattcacttagtgacattatgtgtgacagaattaaatgaccgggaagaaaacgaaaaccactttccagtaatatatggcattgctgtcaacattaagactgcagagatttacagagcatcctttcaagatcggggtccggaggagcagcttcgtgctgcgcgaactttagcaggaggaccaatgattagcatttatgatgcagagacagaacaacttcgtataggaccgg

SEQ ID NO: 1622 - DNA, 187 bp, Homo sapiens
accttaaagcttataatttatttaaaatagtgctattgtgaacgaatgtcatgcttccacatgattcataatagaaattctaatattaaattaatttctctaagagttattacctatagttgaaaggtcataaaaatggaagcgagtaactgcgtgaatacacacacactcttttagtatattttgt

SEQ ID NO: 1623 - DNA, 474 bp, Homo sapiens
acaagtcataaacacagtgtgcagcagtgatgatccacaggggcgtgatgacagagcccccgcacaggtggtagccctggaactgaaggctggcctgccagggccactgcgagagcaaggacatgtttccacccacggtgcgtgagctgtagccccttctatgaccacaggctgtgcactgcaaggtaaccacgtggccagaggcacatccctccctcacatatactgagtggtgtaatgcagtcaccttgtcatctggcaagaggtgatcgatggacacaaactcctcccggaactgcccctccagcgagctcactctgaggttatctgaactcacatagcttgggaaacccagttgggcacaggcaacatttgcgtagtgacccttccagtcatcggagcacatggtcttccacgaagcagctgtgaacacctggagcacggcattctgaccacccacccggacacagcggt

SEQ ID NO: 1624 - DNA, 202 bp, Homo sapiens
  misc_feature 15: n = A,T,C or G
acaggtttcactatnacaaatatatgatgttaaactaacaaactcatgaccttcaaagatgtcttcgtcccacgcacacacatttgtaatttgtgtccatttgctatttcccttcttctataatcttcaaattatatagttatgcattgagttccctatgcatctcacccatctcctttatctcagccttctcatactttgc

SEQ ID NO: 1625 - DNA, 337 bp, Homo sapiens
acactaccaaggaagctgctgtgtgcagccatcgcacactgggtccccatgaggaaaggaactcagtcggcttaattggctgcggagcatcccaagaaccactgaaaaggcgccactgggctcctctgccagcttcagctacctgctggcaagatggttgtcattcagctaaaagcaagaagagctactcccatcaccagtgtttcccctaacctgtggggaagagcttgctaagacttactcatgctttgtttgtatctgcaggaaggggtcctgagtgaccactgaaagtcacttgccagcctggcttttctagtagccatagtggctgagtcac

SEQ ID NO: 1626 - DNA, 257 bp, Homo sapiens; identical to SEQ ID NO: 1118

SEQ ID NO: 1627 - DNA, 256 bp, Homo sapiens
atacgaagatggcacattttcacatagctgattttcaaccaaatgaaaaaaatcaagtgcatttcagaagcttttggaagagcagcttaattcctctcagtcgggaaatgttttctctgccttctgctttgcttgcaccaaacatttctaaacacttgttctgccatctacatgggaggtgatgaaactcagtggtaactcatgatttatgacattgaaaataaagaggaacattgacctgcagactatggtttgt

SEQ ID NO: 1628 - DNA, 218 bp, Homo sapiens
  misc_feature 13, 15, 200, 201: n = A,T,C or G
acgaaggcccaancnaaaaaccccgattttagatgtgatatttaggctttcattccagtttgttttgtttttttgtttagataccaatcttttaaattcttgcattttagtaagaaagctatctttttatggatgttagcagtttattgacctaatatttgtaaatggtctgtttgggcaggtaaaattatgtaatgcanngtttggaacaggagaat

SEQ ID NO: 1629 - DNA, 222 bp, Homo sapiens
gcggagacggcaaatggcggacttcgacacctacgacgatcgggcctacagcagcttcggcggcggcagagggtcccgcggcagtgctggtggccatggttcccgtagccagaaggagttgcccacagagcccccctacacagcatacgtaggaaatctacctttcaatacggttcagggcgacatagatgctatctttaaggatctcagcataaggagtgt

SEQ ID NO: 1630 - DNA, 224 bp, Homo sapiens
  misc_feature 13: n = A,T,C or G
actatgagaccancttcttcacaggttccacgagtcatgtcaacacagcgtgttgctaacacatcaacacagacaatgggtccacgtcctgcagctgcagccgctgcagctactcctgctgtccgcaccgttccacagtataaatatgctgcaggagttcgcaatcctcagcaacatcttaatgcacagccacaagttacaatgcaacagcctgctgttcatgt

SEQ ID NO: 1631 - DNA, 220 bp, Homo sapiens
cgggcgcagacggcggcagtgcggcttgctcttggaagttcaggctcggttgtcttttgggagccatggagagtgacttttatctgcgttactacgtggggcacaagggcaagttcggccacgagttcctggagtttgagtttcgaccggacgggaagttaagatatgccaacaacagcaattacaagaatgatgtcatgatcagaaaagaggcttatgt

SEQ ID NO: 1632 - DNA, 342 bp, Homo sapiens
gtgggcttgtgggtctttgagacccgaaaattgagagcgttttcgcactccagcggctgctcctggcggctctgcggccgtcaccatgccacagaatgaatatattgaattacaccgtaaacgctatggataccgtttggattaccatgagaaaaagagaaagaaggaaagtcgagaggctcatgaacgttcaaagaaggcaaagaaaatgattggtctgaaggctaagctttaccataaacagcgtcatgctgagaaaatacaaatgaaaaagactatcaagatgcatgaaaagagaaacaccaaacaaaagaatgatgaaaagacaccacagggagcagt

SEQ ID NO: 1633 - DNA, 528 bp, Homo sapiens
  misc_feature 40, 63, 73, 79, 87, 94, 148, 154, 178, 221, 253, 261, 266,269, 301, 319, 336, 357, 404, 417, 420, 426, 433, 454, 459,514: n = A,T,C or G
acaagctttttttttttttttttttttttttttttatcgncggggcattccggataggccganaaagtgttgngggaanaaagttanatttacnccgatgaatatgatagtgaaatggattttggcgtaggtttggtctagggtgtancctganaataggggaaatcagtgaatgaancctcctatgatggcaaatacagctcctattgataggacatagnggaagtgagctacaacgtagtacactcccacnaccacggnatggnctntttcatatggctcaagggtcaactgctcctgnggcttcatgttctcctgntgcatctttttcacttnggaggcaaacacggcctcggntgaggctgtggagtcaatgcagttggccttaatggaaatcacaaagngtcctccattacncangaaggngtgggcnttcagggccacaatccgggtntggtntggctgggccacatcagcaaagatcacatccaccattgcgatgaggcatgcggtntttgtgtgggtgtc

SEQ ID NO: 1634 - DNA, 502 bp, Homo sapiens
acctgtttctccctcattcggaaaatttcaaaatttgtgacaacaccctgggtgcctttcggagtcctatctactttcacacacaagtagtctccgttcttctgccaatggagcttgcagtccaccacattgaacaggttcctcactcggatctcttgcctggtagggagctgcatcagggttaccctggctggaatatctttgtcttcaggcacccagaaggcgattatgttaccaccaggagaccaagaaaagtcttttatcccagagatcttcaaactcttcttgtccaaaagacccatagaaggagtttcatagatgctaagcgtatccagggtcattctggcaaagaatttgccatcatggctccacttaaaaataggccaatgggctgagctctcacagtgaaaacccctcttcttgtgccccgtaaggatgtcccagatgattatggcctgagggtcatcctgcgtgtccatcagggggctaaaggtcaccaggt

SEQ ID NO: 1635 - DNA, 590 bp, Homo sapiens
gccgactcacacaaggcaggtgggtgaggaaatccagagttgccatggagaaaattccagtgtcagcattcttgctccttgtggccctctcctacactctggccagagataccacagtcaaacctggagccaaaaaggacacaaaggactctcgacccaaactgccccagaccctctccagaggttggggtgaccaactcatctggactcagacatatgaagaagctctatataaatccaagacaagcaacaaacccttgatgattattcatcacttggatgagtgcccacacagtcaagctttaaagaaagtgtttgctgaaaataaagaaatccagaaattggcagagcagtttgtcctccccaatctggtttatgaaacaactgacaaacacctttctcctgatggccagtatgtccccaggattatgtttgttgacccatctctgacagttagagccgatatcactggaagatattcaaatcgtctctatgcttacgaacctgcagatacagctctgttgcttgacaacatgaagaaagctctcaagttgctgaagactgaattgtaaagaaaaaaaatctccaag

SEQ ID NO: 1636 - DNA, 185 bp, Homo sapiens
  misc_feature 14: n = A,T,C or G
actcccgattgaancccccattcgtataataattacatcacaagacgtcttgcactcatgagctgtccccacattaggcttaaaaacagatgcaattcccggacgtctaaaccaaaccactttcaccgctacacgaccgggggtatactacggtcaatgctctgaaatctgtggagcaaaccaca

SEQ ID NO: 1637 - DNA, 194 bp, Homo sapiens
gacaaaatccagcatttctttatgattaaaccctcagcaaaattgtcatagagggacataccttaacataataaaagccgtctatgacaaacccacagccaacattatactgaacagagaaaagttgaaaggattcccctgagaactggaacaagagaaggactcccagtttcaccacttctgttgaacatagt

SEQ ID NO: 1638 - DNA, 476 bp, Homo sapiens
  misc_feature 13, 14, 405: n = A,T,C or G
acaaacttacagnnctgtatattccaaataaaggtttttcttcctactatggtatgacaatataactgttttctgaatgaagatacatgttaaggcttaaggtgtaaacactttggaaggcaaacagcttagtgaaaaaaattatggttcatttaaaaatgtgtatcatttcataatagacccctgaactttcaaatttacatgtgagaatacatttacatcttaactttctaggaaaggcacaggctttatgtaaaaaagcagcaaagttttaaacccaccaatatattgacaaagccattacttttattagaaacaaataatgcttctcaaggtgttggcaacatgtcatagtatcaacatatacttcatacagtgtatttctccctttaattatattccggnaggaggtggaatacctccttggctatgaggggcagatgtatttgatggactgtgtaggctggtctccttgt

SEQ ID NO: 1639 - DNA, 139 bp, Homo sapiens
aatcaatcgatcgatcgcgaaataccctttgtaagaaaacacacacacccactcacacacgcacgcgggaaaatgcaagacgagggtgactggaggcccagcagggttcgcgccgccgccgtctcctgctcgcagcact

SEQ ID NO: 1640 - DNA, 232 bp, Homo sapiens
  misc_feature 11, 12, 13: n = A,T,C or G
acttgattgannntcagagaaatatcacaaattagaaatattaaatctaaggatgaaaggtatatataaaacaatttgggggccaggcacgatggctcaaacctgtaatcccagcactttgggagaccaaggcgggtggatcacttgaggtcaggagttcaagaccagcctgggcaacatggcgaaaccctgtctctactaaaaatacaaaaattagccgggtgtggtggca

SEQ ID NO: 1641 - DNA, 326 bp, Homo sapiens
gcgagctccggaggaatttcagtatctgctacggtaacttcatcagcccgccaagatggcgatgcaagcggccaagagggcgaacattcgacttccacctgaagtaaatcggatattgtatataagaaatttgccatacaaaatcacagctgaagaaatgtatgatatatttgggaaatatggacctattcgtcaaatcagagtggggaacacacctgaaactagaggaacagcttatgtggtctatgaggacatctttgatgccaagaatgcatgtgatcacctatcgggattcaatgtttgtaacagataccttgtggttttgt

SEQ ID NO: 1642 - DNA, 303 bp, Homo sapiens
actgctttgtgtgcctgctgaggaagaacccgttgtaatctttgtagtagtgcttgtgctggaaagcaggcttttctgaagcccagctgcagaggtaactgttggtgttgatgtggtgcttggaacactagaactaatcaaatcatcttgtcttctaccaaaggagcaacttttatgatacgttgatccttcattaactgagctattttttttaagatcatcttcccattttctccttgtatatgaactacttgttcgcaaacttgaagaatctctgttttctttctcttcaatgtcagatgt

SEQ ID NO: 1643 - DNA, 324 bp, Homo sapiens
accgcctccttcccagccgcgcggcttcctccagacctctcggcgcgggtgagccctattcccagaggcaggtggtgctgaccctgtaacccaaaggaggaaacagctggctaagctcatcattgttactggtgggcaccatgtccttgaagcttcaggcaagcaatgtaaccaacaagaatgaccccaagtccatcaactctcgagtcttcattggaaacctcaacacagctctggtgaagaaatcagatgtggagaccatcttctctaagtatggccgtgtggccggctgttctgtgcacaagggctatgcctttgttcagt

SEQ ID NO: 1644 - DNA, 323 bp, Homo sapiens
acgtcatacaaaggaatatcattcagtaataaaaagaaattagctatcaagccatggaaagacttgaggaatcttaaaaggatattactaagtgaaagaagccactctgaaaagaccgcacactagatgattctaactacatgacattctggaaaaggcaaaaatgtggacacagaaaaagattagtgattgcctggtgttcagggagaggggaaaatgaaagaggtgacgcaaaggggatttttagggcactaaaactattctacatgatacagtaacaatgaatatatgccaccataccttcgtcaaaacccgcagaatgt

SEQ ID NO: 1645 - DNA, 480 bp, Homo sapiens
acggcgcacaatggaaaggagccagaagccaaaacagaagcataaccgttggtcgtggggaggctctctccatgggagccctagcatccacagtgcagatccagacaggcggtcagtttccaccatgaatctttcgaaatatgttgatcccgtcattagcaagcggctctcctcttcatctgcaactttactaaattctccagatagagctcgccgcctgcagctcagcccatgggagagcagcgttgttaacagactcctgacgcccacacattcgttcctggccagaagtaaaagcacagctgccttgtctggagaagcagcatcttgcagccccatcatcatgccctacaaagctgcacactctagaaattcgatggatcgaccaaaactctttgtaacaccacctgagggctcttctcgcaggaggaccattcatggcacagcgagctataaaaaagaaagagagagagaaaatgt

SEQ ID NO: 1646 - DNA, 215 bp, Homo sapiens
actattggtcagataatgttgttacactgaaaaaattcaccacatacaaagacaaatgcttgcccctagcacattcacagcttcaactgctacagactgtcactgaaaaaaatgcattggtcagtctgaaccatgtcaagtaaactatggaagtagcaaatccacaacacaaactgtgctagcactttcttttcaagtctaactccaaaataggt

SEQ ID NO: 1647 - DNA, 351 bp, Homo sapiens
  misc_feature 198, 199, 309, 310: n = A,T,C or G
acagctattatttgccatggaaaaggttagtctcatttagaaaaatcgaaagtgcacagcacttaaagggaatatatgaggttttttttttaaaaaaaaaacttttatttattatttgtagtatattgtctgaaatgtgttggcagttttttttcttttaatgtgtcaaatcttgaaatattaaatgtatacattttnngctatgttttgggaacaaatctgtttgatttatatagttttatattgaattttttttgccctgattgtttagggtgataggtcttaagcagcatatatctatatatctgnntgtgggtatatagagatatatgtgtgtgtgtatgtatatgt

SEQ ID NO: 1648 - DNA, 504 bp, Homo sapiens
  misc_feature 435, 436, 499: n = A,T,C or G
acattcaggacaaatgattagccctaaatgaaactgtaataatttcagtggaaactcaatctgtttttacctttaaacagtgaattttacatgaatgaatgggttcttcacttttttttttagtatgagaaaattatacagtgcttaattttcagagattctttccatatgttactaaaaaatgttttgttcagcctaacatactgagtttttttaactttctaaattattgaatttccatcatgcattcatccaaaattaaggcagactgtttggattcttccagtggccagatgagctaaattaaatcacaaaagcagatgcttttgtatgatctccaaattgccaactttaaggaaatattctcttgaaattgtctttaaagatcttttgcagctttgcagatacccagactgaggctggaactggaatttnncttcctattgactctacttctttaaaagcggctgcccattacattcctcagctgtccttgcanttagg

SEQ ID NO: 1649 - DNA, 577 bp, Homo sapiens
acaattccttgcttctttatgcaacctaacaaaataatatagaatgaagtcattagaaaaatatgaacctttctgaatctacattacatttttaatttaaattggaaaatacagtttagatcatatgaaacatatggatttcagacatgtattatctgtttctaacagattattacaggcggtctttattttggctgaaatgcaaaaatatgactttcttaataacagattagttaaaaatactttccattgatagcagtgctagtccctagaacaaaaggtaagcaaaacttatttgtaagttactgcctattcaatgcccagaatatgtagatcctaaatctaagcccttaatatacatctactttaaagataactgaaagatctcacatgcctgataatccttaatttaaaccgtcctgtaaacatagtcaaaatctgctaatagaaatacaattcaagtaaacattgcatatttgatttaaaccaccttacagttaaattcactcatgacacattggatcataaccactaatatgtaaaaagttttaaaaaaatcatccttacgtatagatga

SEQ ID NO: 1650 - DNA, 234 bp, Homo sapiens
actactgattattaagcaggacagactgagctttctgttgcaaataccttggaggagaaagtaatttctaaatatacagagaggtaacttgactatatatgttgcatcctgtgcctcccttcatattaatatttgataaagattttaatttatgtaaaacttctaaagcagaatcaaagctcctcttggggaaatggcaagtctttaggataggcaagaccctgtatgaatagt

SEQ ID NO: 1651 - DNA, 296 bp, Homo sapiens
accaaaggcaaaacattatacttaaaattaaattacagatgcatgaagaataaaagtttaatgtatcaaagataatttgttatttaatgcactcaatgtcagtatttggggcaatttttaaagttttcccaaaaaatggcatgaatagctctatacaataataggtaagaacaggaaaatgaaaacacctttataccatattttcacaaaccattctaaagacagcaaacttgagctcagctgcttttccttgctttaaaataagctaccagtaattctaaatcagactaaaatgt

SEQ ID NO: 1652 - DNA, 452 bp, Homo sapiens
  misc_feature 418: n = A,T,C or G
accttcattgcgatcaaaccagatggggtccagcggggtcttgtgggagagattatcaagcgttttgagcagaaaggattccgccttgttggtctgaaattcatgcaagcttccgaagatcttctcaaggaacactacgttgacctgaaggaccgtccattctttgccggcctggtgaaatacatgcactcagggccggtagttgccatggtctgggaggggctgaatgtggtgaagacgggccgagtcatgctcggggagaccaaccctgcagactccaagcctgggaccatccgtggagacttctgcatacaagttggcaggaacattatacatggcagtgattctgtggagagtacagagaaggagatcggcttgtggtttcaccctgaggaactggtaggattacacgagctgngctcagaactggatctatgaatgacaggagggca

SEQ ID NO: 1653 - DNA, 284 bp, Homo sapiens
gatctttatgtagaaggacttcctgaaggaattccttttagaaggccatctacttacggaattcctcgcctggagaggatattacttgcaaaggaaaggattcgttttgtgattaagaaacatgagcttctgaattcaacacgtgaagatttacagcttgataagccagcttcaggagtaaaggaagaatggtatgccagaatcactaaattaagaaagatggtggatcagcttttctgcaaaaaatttgcggaagccttggggagcactgaagccaaggctgt

SEQ ID NO: 1654 - DNA, 602 bp, Homo sapiens
  misc_feature 569, 578: n = A,T,C or G
acagaacatcgtcagcactagcacagtttacagaacctcacagacccaaaggaacatcaataggcaaagcgactacaggaggcgtgtgtccgcgtgggcgaggtaaagagggtcagtattggtcaagtgccagtgtcggtaatctggcaagacagtgatgttaagaaggttcatagtttaagaattatctaaaatattttaaaaactataaagctgcaacacatgatttttacacctagttactagaaaactaaggaaagcacttattagctctgaataaagtaacatggaaagcacttttactaatcgacaaaaaaaccttctaatgcattatcagaaagattttataatacaaggaggcatattgctcagtcagaaggggttctataagaaaagcacttactaagttagcgactaacagaacaaccagtttaaagatgaattaaatgcccaatttggggaggcatggcaggtgtaagagaaaggaaaagcttaagaaaacatttcctgataataccaacctttctttcatcatctactgcatttgacagaaattaaccttttagagnttttacccntgacactttcattccttgtacctg

SEQ ID NO: 1655 - DNA, 197 bp, Homo sapiens
actggccttgggcctcctatgatgcagacatggtgaatttaattcaaggaggaggagaatgttttaggcaggtggttatatgtgggaagataattttattcatggatccaaatgtttgttgagtcctttctttgtgctaaggttcttgcggtgaaccagaattataacagtgagctcatctgactgttttaggatgt

SEQ ID NO: 1656 - DNA, 173 bp, Homo sapiens
  misc_feature 79, 161: n = A,T,C or G
gtccaaatactcaactgccactcggccttcagtagagcttaatacataaccctgcttgtttggaaacgctcgtatgcancgagtctggtatttcaggctggactccctgcgctgctgcacgtaacccatgttccgtaagtcccacaccaacactctgcggnctgctgttccca

SEQ ID NO: 1657 - DNA, 435 bp, Homo sapiens
accaccagatacttaaagcttcaaaaagactgcccctaccaccacaggaggaccagcctaaccatacgctccaaaagatggctgtgatagatcttgtgaagcaattactgagcagatcaagatctttgggaaggaacactaaagatgttttgaatgaattatagtccactggcattttagtgtatttttttttctttttagaaacacacatttctaaaaatgtcatgttacattcctgcatgtcccttttgatagcattagtggatccattggatttcttttttctttttgtgagacagcttttagtcttacctgaatttatgtgtgtttttccgacagtggttaataattatattggtgatgtagcagcaattgtgttggcagggttttcatatattattagtaattaacactaactgttggactgacttgtgt

SEQ ID NO: 1658 - DNA, 128 bp, Homo sapiens
  misc_feature 9, 10, 11, 53, 68: n = A,T,C or G
ttttttttnnnttttttttttttatgggttctgcatctcgtttattagcacanaaataacaggtttanagtatattacaaaaagagctcaaactgttcaaatacagcaactgggcttactaggggaca

SEQ ID NO: 1659 - DNA, 296 bp, Homo sapiens
  misc_feature 15: n = A,T,C or G
acagttaaaaatganagcccaatacagggtattataaggaacaaggtataaaagagaggcaggcgcttgattacaaatgagtaagtgacatacggataccagcaacagctgtcggttctgtttcctttgctccctgttgcactcacaatctcccattctccattatcaaaaaaatctctcttgtctacatcttggtcctctagaattatatcaacctgtgatccatcataagtccaagaaccaaatttcatggaacagttctgaaggtcaaatgggaaaaacgtgacatctatggt

SEQ ID NO: 1660 - DNA, 581 bp, Homo sapiens
  misc_feature 421, 554, 559: n = A,T,C or G
actttactgcacccagcagactttcaacaactcattgatccaaagatacatgcacagtctgagcaccagctatggtgctcataacttctttaagacttgaaccctttcaatctgtgtgattcattaaattggaccattgatgatgagaatacacattgtatgtttctgtgcacatgacagtgtgtgtgtgtgcacgtacatactgtatagtcttaaaaatagcattatactggccaggggtggtggctaacgcctgtaatcccagcactttgggaggccgaggcgggtggatcaactgtggtcaggagtttgagatcagccaggccaacctggtgaaaccccgtctctactaaaaatacaaaaattagctgggcgtgatggtgggcgcctgtaatcccagctacttgggaggctgaggcangagaatcacttgaacccgggaggcggaggttgcagtgagccgagatcgcaccattgcactccagtctgggcaacagagtgagattccgtctcaaaaaaaaaaagaaaaggaaaaaatagcattatacctcttncttgnctcaaccgccatgaaaattctg

SEQ ID NO: 1661 - DNA, 118 bp, Homo sapiens
actgctatttattgataacatctttcgcttcacccaggctggttcagaggtgtctgcattattgggccgaatcccttctgctgtgggctatcagcctaccctggccactgacatgggt

SEQ ID NO: 1662 - DNA, 249 bp, Homo sapiens
acattaagaagagatccaaattacaagagaggcagataaaatttgaattctttaagcattcattaaacgaagttttggagtaacatccacgtttatcttcctttcactaatcacgttccctgttaagcacatcataacaacagcacagtgaagtgaatgatgaaataagagcattttgatacactagaaaacagtgctcagtgagacatttacattctatttatatgattaaacatttgatcatacagt

SEQ ID NO: 1663 - DNA, 545 bp, Homo sapiens
  misc_feature 487: n = A,T,C or G
actgtctgatttactacacagagaaactttttttttttaagatatatgactaaaatggacaattgtttacaaggcttaactaatttatttgcttttttaaacttgaacttttcgtataatagatacgttctttggattatgattttaagaaattattaatttatgaaatgataggtaaggagaagctggattatctcctgttgagagcaagagattcgttttgacatagagtgaatgcattttcccctctcctcctccctgctaccattatattttggggttatgttttgcttctttaagatagaaatcccagttctctaatttggttttcttctttgggaaaccaaacatacaaatgaatcagtatcaattagggcctggggtagagagacagaaacttgagagaagagaagttagtgattccctctctttctagtttggtaggaatcaccctgaagacctagtcctcaatttaaattgtgtgggnttttaattttcctagaatgaagtgactgaaacaatgagaaagaatacagcacaaccct

SEQ ID NO: 1664 - DNA, 529 bp, Homo sapiens
  misc_feature 389, 463, 507: n = A,T,C or G
acaatctcctgtttctttgccatagtggctttgatttgggattatatgcacccctttccagagtccaaacccgttttggctttgtgtgtcatatcctattttgtgatgatggggattctgaccatttatacctcatataaggagaagagcatctttctcgtggcccacaggaaagatcctacaggaatggatcctgatgatatttggcagctgtcctccagtcttaaaaggtttgatgacaaatacaccttgaagctgaccttcatcagtgggagaacaaagcagcagcgggaagccgagttcacaaagtccattgctaagttttttgaccacagtgggacactggtcatggatgcatatgagcctgaaatatccaggctccatgacantcttgccatagaaagaaaaataaagtagccaattctaaaagtagccctctttctcctggatcttgctgaattantggcttggggggtgggggagataaaaagaacttaaaaatgggtnaagtaagaaatgttaaaaaagt

SEQ ID NO: 1665 - DNA, 372 bp, Homo sapiens
accagcagtgcccaaaatctttaagccataagctctagcaatttggcatgctgttaatccaactcctccacttgccccatgaaccagaacactctctccagctttcacacaggcactgtggatcagagctcgataagcagtaaaatatggaatgccgatggcagctccttgtttaaagtccagtttttcaggtagtttgtaaacagtgtggtctgctgcaagagcatactctgcataacccccagagatcgtgctgctagtgaaaactctgtcacctttcttgaaagcagatgcattatctccaacagcttctatcaccccagccacatctgagccaggagtatagggtaagagtggttttctactataagt

SEQ ID NO: 1666 - DNA, 194 bp, Homo sapiens
acagagtggcatcaaggtgcggctacagctctaccgaacagccaagatgggctggggggtccgcgccctgcagaccatcccacaggggaccttcatctgcgagtatgtcggggagctgatctctgatgctgaggctgatgtgagagaggatgattcttacctcttcgacttagacaacaaggatggagaggtgt

SEQ ID NO: 1667 - DNA, 295 bp, Homo sapiens
atttttcacttgttgccccaaatgtgaaagcatttcattcctttaagaggcctaactcattcaccctgacagagttcacaaaaagcccacttaagagtatacattgctattatgggagaccacccagacatctgactaatggctctgtgcccacactccaagacctgtgccttttagagaagctcacaatgatttaaggactgtttgaaacttccaattatgtctataatttatattcttttgtttacatgatgaaactttttgttgttgcttgtttgtatataatacaatgtgt

SEQ ID NO: 1668 - DNA, 525 bp, Homo sapiens
acagaatactttcccatttagagggtgttcttcctgagtaatttagcctctatttcaggatccaggcacggcagatgatccccgcacatgaaatcataagtgcaaccagtgatggttacttttcctctctaaatgaggcagccacccctgccaaatggacgggtctccctgtgctctaaggctgctgctggtattgcccttccgtggctgtgtagaaatcatccaggacgctctgtaagtagtcaaacgttggtctctcttctgccttttctttccagcacattttcataatgtcatagagctcatctgggcagttctccacacggggcatcctgtagccctgggacagggcggtcatcacgtcggcattagttctccctgggtagggaattttcccataggtgacaatttcgtataggaggattccaaaggaccacacatcagacttaatagtgaaacatccaaagttgattgcttctggagccgtccacttaatagggaacttagcaccttcccttgctgtgt

SEQ ID NO: 1669 - DNA, 476 bp, Homo sapiens; identical to SEQ ID NO: 482

SEQ ID NO: 1670 - DNA, 389 bp, Homo sapiens
  misc_feature 280, 331, 371: n = A,T,C or G
actgatgtcaaccccagtgtttcctcatttactgagcatgtgtgactttcaaaaggctctgttactctcttgatttctgtgaggagcgagatagccatgactttaccctgaccatgtgactggaaacatactgaatattattggatggagaagttcacagtgtttcacaaacacatgacaagttattgttaacattatatgaatgggaggtggcaggtcaagtaaggccagagaagcattcaagctgacaccttgttcatgaatttaatctcttatgagnaacagctagaatgatcacagtggccagtttggtagcctgatcattttggtncatatgcagaaatgttctcaaatggactttgagagttagnaattagttggtatacagg

SEQ ID NO: 1671 - DNA, 315 bp, Homo sapiens
acccctttattgctcaaagaaagcaagccacaaacaataatgaagcaaaaaatggaatctaagaatctttttgtatggaatattacttctatcagaagatgatcaagatgtttcagtccagtgcacatcagcattgctgacattttatggattctaaacttgtgttgtttctttttaaatcaactttttaaaaaaataaagtgtaaattaaccgactagagtacaagcagactctgaagatgatcagacaaggcaaagcgaaattggtcattctcgctaacaactgcccagctttgaggaaatctgaaatagagt

SEQ ID NO: 1672 - DNA, 128 bp, Homo sapiens
  misc_feature 14, 18, 19, 109: n = A,T,C or G
acactgaatgatgnagcnnctgctctggttctcatgacggcagatgcagcgaagaggctcaatgttacaccactggcaagaatagtagcatttgctgacgctgctgtanaacctattgattttccaat

SEQ ID NO: 1673 - DNA, 530 bp, Homo sapiens
  misc_feature 11, 477, 482, 506: n = A,T,C or G
acttttagtanagatggggtttcaccatgttggccagactggtctcaaacttgtgaccttgagtgatccacctgcctcggcctcccaaagtgctgggattacaggcaagagccactatgcctggacctttattttatgtaatagatgttttatgatgtgaaaataggttgatatcttaaaaataggttttcctttctattccaattttgatatgaatgcatttctttgtattgtttttttctcaaataaatgaatcaagaaaccaagacaattggtccaatttgacgtttttcatttgatttaaaaaatgcagaaattaatatactgagtcccttttaagacagaggcctgctcgttaatgtaaaagcttggaaaagttatacaaagaacactccgaaaaataaagtttttgttattaacacaaatgattttgtaagaagcaaaacattttttttcaaaagcaggatttgttctaantctangttcacaaaggtattcatttctanaaatatcaacttaagactgtgaga

SEQ ID NO: 1674 - DNA, 551 bp, Homo sapiens
  misc_feature 530: n = A,T,C or G
acatgatacagattggttttgcagtttttaatgaactgaaatagaaatgtctaaatacagcagtatctgcctgtgcaacaaatatctgtaaggtaaaataaggtatttgatagaagaacatctgcaagaacaaatcagatgaaaaatctgaaaaggtttctatataccttctggattttaaaaaaacccaaaaattaatggctcaagatactacattgctaaagttaggggaaaaaagtaaaaaggctgtgagttctgttgcaagagctcatttgtagacttgcaaaatctaactaattttatattatgcttgttgttagagcagtgctcaaaattacagaagcttcaaattgttatgttttcacaaaatttgctacatatgttgacatgaatgtgtgtcagggaattcatacccaggtaaatgacaattacatcagtatagctaatttttgccaccttgggaggaatggaattctgcctattttcgaattaatcctacagcactcactaaaaaactaacagccatggcnccataatacattttgtgaggt

SEQ ID NO: 1675 - DNA, 279 bp, Homo sapiens
accattggtggccaattgatttgatggtaagggagggatcgttgacctcgtctgttatgtaaaggatgcgtagggatgggagggcgatgaggactaggatgatggcgggcaggatagttcagacggtttctatttcctgagcgtctgagatgttagtattagttagttttgttgtgagtgttaggaaaagggcatacaggactaggaagcagataaggaaaatgattatgagggcgtgatcatgaaaggtgataagctcttctatgataggggaagtag

SEQ ID NO: 1676 - DNA, 383 bp, Homo sapiens
actgggaaaatccagctgggatgtgacacagcttaactgatagcttaaggcatcagtattgggaccaaaggctggtcagatttgtatcattctgaggaccaaatgatgggaacaataaaattgttcatgacagttgttctcattttgctgtccagatgaagactcttaagatgacagaaggtgatttttctggtgatcgaggacttccggggtaatgacagtgatgaaatgcaggggacctggtaggtttcttttggagactaactgggggctgcctggtgggacagaacagcatgtttccaagggctgtggctggtcatagccatgggatctccaactgcatgcaagagcaacctggaaagactttgacagcgcaggtcagt

SEQ ID NO: 1677 - DNA, 312 bp, Homo sapiens
  misc_feature 170, 248, 263: n = A,T,C or G
acggtagaactgctattattcatcctatgtgggtaattgaggagtatgctaagattttgcgtagctgggtttggtttaatccacctcaactgcctgctatgatggataagattgagagagtgaggagaaggcttacgtttagtgagggagagatttggtatatgattganatgggggctagtttttgtcatgtgagaagaagcaggccggatgtcagaggggtgccttgggtaacctctgggactcanaagtgaaagggggcntattcctaggttttattgctatagcccattatgattattaatgatgagt

SEQ ID NO: 1678 - DNA, 234 bp, Homo sapiens
cttcagaagaggctcgcctctagtgtcctccgctgtggcaagaagaaggtctggttagaccccaatgagaccaatgaaatcaccaatgccaactcccgtcagcagatccggaagctcatcaaagatgggctgatcatccgcaagcctgtgacggtccattcccgggctcgatgccggaaaaacaccttggcccgccggaagggcaggcacatgggcataggtaagcggaagggt

SEQ ID NO: 1679 - DNA, 101 bp, Homo sapiens
accagaaactacctctgaaggctacactttccaagttcaggatggggctcctgggacctttaacttttagatcatgtagctgagacataaatttgttgtgt

SEQ ID NO: 1680 - DNA, 316 bp, Homo sapiens
  misc_feature 16: n = A,T,C or G
ttttgaaatataaacngagaggctttctgttgagacattgtcaccaaaacaattttttgaaatgttcctgaaactaatttgggtttaaagattaaaagggttgttaccattcttatctgagtagttgggaggaggggactaccactttagttcatttggaaaatatagacatatttcttttgctttcttaaaacagcttaaaatgatgaacttttataattttaatttgaagattgaataaatattttttataaagattgttttgagtgctgatttgtttactttttgtagatttgctttatccatgatattcagt

SEQ ID NO: 1681 - DNA, 610 bp, Homo sapiens
  misc_feature 277, 356, 363, 426, 445, 462, 520, 526, 573: n = A,T,C or G
acatacaagagacatattctttgacgtataaaaaatacagaaatatttacatgtatacaaaaatattaaaacagatttcagaaataaggaaaacaagcaagtttttacaaaggatactttcttgggaaatacacacaatgaaaaaaagctttagaaaggtgacaacacatttaatagactccagaagttgatatttctgttggtatcaattgagtaagaggaacataaaatgtctgaaatgctaacagatggaaaaccagacatatttaagactgtntaggtaaaattgcatgggtttcctttaccataaaattgaatcaatttttttttaccctcagtatcactatctacttttnctttttncttaaaatatttaaattgtttgatttgtattgagaattttaaactttttctcattaaaattgnaaaaatattttaaagaggntggctatcctctttatnttctggggggaaaaaaacctcaggatactacaccgatttcaacataaaattgaaaatnacaatncaattttttttaaagttaaaacctaacatttttctaactaaacattnatgatcagtaacaaattgatttaataagagatcacaa

SEQ ID NO: 1682 - DNA, 243 bp, Homo sapiens
  misc_feature 14, 15: n = A,T,C or G
actattttaatttnnattgaagaagttcagaaatttaaaagcagagcattttttatgatatcattgttggtgttaattgaaagtataatttgctggaacacaaagaccaaaatgaaagttttttcctccctgcttaaaaatgtagcagcttcttagttactttggaacactactcttacatgtataaagtgattgacttgactttctagcttcccttgtccggaggatattaaaatgctaggg

SEQ ID NO: 1683 - DNA, 304 bp, Homo sapiens
  misc_feature 218, 241, 262: n = A,T,C or G
aaatgccgctggagataaaccataaaatttgtgacactaacgtggcatggggtgaatcacataagctgctagctgttgaacaccagtgtttcaagatacaacttttataaacgttttatttgttttgcttataccatcagaactgaaactactgtccgtgatttccctgaaacagggaaatcaatctaaaacacatactggtgcctttcaaaagatangcaattgaaaagggtggtagcangcaggcatttggtatcttttncttttaaaaaaaagctttcaagctgaaggaaaaacatgtgac

SEQ ID NO: 1684 - DNA, 456 bp, Homo sapiens
  misc_feature 12, 372: n = A,T,C or G
caaacacaaaangcaagatgaaataaactgtttttttttctccagaaatctctactccagtgcccacagcacacaagagtcaaaacaaataagcaactaagatcccccgatcacaaatttccaaagaactggaggaggggaagaaacagggtgaaaatggtggtatgaaagggaatggatgttagcagcactgcttcaataactgatctattctggatgaaatacccttttttatgtgcagtaaattctgaacaaggctaaattttaggatattccttgaactgaaattagaaaataccctgacaatggaagcagctctttcatctaagtttaataagagcctctttctccatgggccactgttgtgaacanaagccttttctggcatcaaaagctgtcacagtagcccttccatctctttcatgaaagcctcatagacatcatccttaggtttgt

SEQ ID NO: 1685 - DNA, 279 bp, Homo sapiens
  misc_feature 8: n = A,T,C or G
aaacaganacaacttttcattggtggagaagcttgtctatggggagaatatgtggatgcaactaacctcactccaagattatggcctcgggcaagtgctgttggtgagagactctggagttccaaagatgtcagagatatggatgacgcctatgacagactgacaaggcaccgctgcaggatggtcgaacgtggaatagctgcacaacctctttatgctggatattgtaaccatgagaacatgtaaaaaatggaggggaaaaaggccacagcaatctgt

SEQ ID NO: 1686 - DNA, 572 bp, Homo sapiens
acaagaaacacatgactcttttcatatcaatgggagggacttttctacaaagtattttccaggatgcaacccacatttaaacaatgtaaaattctttgtttcctgcaacaacttacaaaataaggtaaaagactaaaattcaagatttgcttccttcattgtcctaagacgattcgttgagaatcactgactttgagatatttaaaactttaagcattatactgtggtttcttttgcactgcactcacctattcaggactcctcccccaggttcttcatcatgcacaaaaatgcaaagaaaacatcttattagtaattaatgaagcaacattgaaattctaactctagctgtctttggattctaattaactcagcatcaatttctcacctcagactacagtgaatttttatttcctatcagctgaaatatttcacagatggaagctcatgtttcagttttaatgactgccttgaataaacaagttgttgccacttgtttcaaacaaaagcctaaaaataatctacattcaattttaggctccattgactaatatggtgttgcttttggaagt

SEQ ID NO: 1687 - DNA, 179 bp, Homo sapiens
  misc_feature 142, 143: n = A,T,C or G
acaatcttaaaacctgtagttctcaattatagtaatatttcttacttccagtaatatgtctcaataccttggactgctggatgtcaaaagacaatacctgggggccatctatgagatctgaacaaatagaggaattctctannactgtatactctctattttggctttttgaatgaagt

SEQ ID NO: 1688 - DNA, 440 bp, Homo sapiens
accctgaccgcacagatggtcatagctgaacgagcctgaaggctggcaagttcattcctacctgacaggagatggctaaggctcaaagaaggtgatccaggcgagtgcagacctgggctggggcccagcatggagggcagcctggcccactatggcccactttgctatcctagggccccagggaaaggtatacttctttccacccaggaaagcctggccccaggacagctggctggctgggggaaggaggaagaagaccctcttgctccagaaatggccaacacagcaaatgcccaaacaactctttggttcagactagcaagcaaaggctgagagaggatcaatgtcttgcctgaagtcacacagcaatttagtggaggagccagaatggaacacagggctcttgacacccaatcttgggcaaaggactcagaggaggt

SEQ ID NO: 1689 - DNA, 347 bp, Homo sapiens
  misc_feature 46, 47, 51: n = A,T,C or G
actaatgatggcaaataatccatttatattttacaaaataaaacanntcantaatatatggctcatcctacctctgtggcaatacaaaatgccatttcaaattttttttaaaaagattgtgtgaatacttcgggtgagaataaaatataaaatactatctatataaagaataaacacataaaatacagtgtatgccttttaaaagtttggacagacgtatcttcatagagagatgcaaacaatgaaagtgtagttataggtccaaacttagccaaaatatgacagttttaatataatagtttgtttgaaaaaaagtagtcagacttcatccaaaccacccttgcggt

SEQ ID NO: 1690 - DNA, 315 bp, Homo sapiens
acatgaagtttctatttgattatgtggttttatatcacattcgttcaaatgcatttctctcccttagagggactattccaacatcactcctttggaattatttcagtcatccttaacatgtgactttaccaaagaccttgaagctaaacaaacaagcaaaacaaaatttcaatgactcttagatgaatggaataagaaatagtcatcacatgtcaattagggatgttcatctccaaccaagacactgtcaaaatgtttcttctgatacagcagttataagtcagagccttcaaaaaacaagggcagaacaagagt

SEQ ID NO: 1691 - DNA, 351 bp, Homo sapiens
accctagtaacaagtcatatcacgatcaataaatgatcacagcctttcgaaaaaactactgagattggagaatgggtttctgtctccaacccctgaaagacgttgctgcttcaagacctacagctccaagaagacaactcagaatttcttacttttaaaaaaatattgtcatgaataactgaataattagatttctaggaaaatgaggcttttaaattaagatttagcaaaatcaactataatgtatttacttctactcattgatgaatgacagaaatcagttaaagttttacatacaaaagatataaatactgcataatacgtagtgaatattggcacaaaccctttcgt

SEQ ID NO: 1692 - DNA, 373 bp, Homo sapiens
  misc_feature 358: n = A,T,C or G
accaactcttgtcaggctcagtggcagcttctacgacctgatggatggaaaaaaatcaaactctgtgactctatggttgactgccacctctgcaaccttgactcatctgctgaaaaggcaagaagaagaaagggcagcaagccctgttttagggactacataagatgaggggagataagggggacatagatgagttctttaggattgcgtgtgttttgagtttttgtttctaactgaagaaatctgtcaatattaaatagggtgggaaaatggtttcttagaataactgttcaactgtgtgtaaataaggaaagttttcaatgagtattacttattgtaattaatgcagaaggacttncccagtcaaaaaaaa

SEQ ID NO: 1693 - DNA, 537 bp, Homo sapiens
acttacacgtaagattttagcctatggtcattttataaagatgactgttaggatttaattcacatttaaagaaaatgagattcgttatattatggtgttttttatgacctataaaatacttacccctacaaatttccataaatgtagtggttagtaaagcttttttcttactgaaaaataatgccaggtaaccaagtattattccttccatcatttatttaggaaaaagttttatgtattagggtaaagtggtagaagttaacctagaatctaataatctccaatcacccattcctgatctaatagtagccatgagaaaaaatctctagaaagaatcatacctctcaaaaaataaaaaataaaacaaaggctgggtgcagtggctcacacctgtaatctcagcacttccggaagttgaggtgggcagatcgcttgagcctaggcatatcgcttgcagcctgggcaacgtggcgaagccgtctctaccaaaaaatacaaaaagtagccgggcatagtgacatacacctgagcccagga

SEQ ID NO: 1694 - DNA, 566 bp, Homo sapiens
actcgtttccacaccaagactcagactttttgagccaaaaaaaagccacattcttacactgtccagcttgtaatggttaatgtaaaacttaccagatgaaccttgtgtttcagcttttttcttttccccttccccttgcttcagaggcctgatggcgtcggactattccgaagaagtggccacctccgaaaaattccccttctagaacatgtagacacttgagaaatgtttctgtttgaagaaaatagagggagaaacagaagtcttaagtctgtggcacactgtgtcttcagacagtttgaaggaatgaaaacctagagattttaaatcatgaattgaacatgtaaaattccagtaaaatgtaaaaacggaatatgcatcgctcttaaccttgagcatagtgacttagagacactgtgtatcagttttgccaataagactgtggacttcatgattgttgttgaacttctgggtcaaaactcaaatgaggtgaattttgcctttaaagggtttatttgctgagaaccaactttcaaatagtcatgagagaatcaaataatagatgt

SEQ ID NO: 1695 - DNA, 223 bp, Homo sapiens
acccctttattgctcaaagaaagcaagccacaaacaataatgaagcaaaaaatggaatctaagaatctttttgtatggaatattacttctatcagaagatgatcaagatgtttcagtccagtgcacatcagcattgctgacattttatggattctaaacttgtgttgtttcttttttaaatcaactttttaaaaaaataaagagtaaattaaccgactagagt

SEQ ID NO: 1696 - DNA, 332 bp, Homo sapiens; identical to SEQ ID NO: 875

SEQ ID NO: 1697 - DNA, 414 bp, Homo sapiens
  misc_feature 219, 377: n = A,T,C or G
acttgttgttgctttgtttggagggtgtggtggtctccactcccgccttgacggggctgctatctgccttccaggccactgtcacggctcccgggtagaagtcacttatgagacacaccagtgtggccttgttggcttgaagctcctcagaggagggcgggaacagagtgaccgagggggcagccttgggctgacctaggacggtcagtttggtccctncgccgaataccacatgattaccactactgtcccgggagagacagtaatagtcagcctcatcttccgcctgagccccagtgatggtcaaggaagctgtgtttcctgagctggagccagagaatcggtctgggatccctgagggccggatgttaccatanatgacaactacaggggcctgtcctggcttctgctggt

SEQ ID NO: 1698 - DNA, 408 bp, Homo sapiens
actaccacagactgttgacttttagtttcttaaagagaaaaattgcctttttactagaaagcctttgtatattgcaatttttctgtttgggaaaatctaaggatttactgtggttagtcttacagaagaaatgtggatttgataaactagtgcctatgattttaacttatgtttgatatatagtagtaagggttttatgaatgttgattattttgtgccaacagcccagaattgtcacttatatgtaagcagaaaacaatgagctctgcttccaaagttatttaattttctcagtgtttgaatgttattttttgtaagtgtgttaataaaagtgtaaagaattggaaaaaatataaatattcttaactcaagcatttgctggatcatttttctacaaaacttgtttgt

SEQ ID NO: 1699 - DNA, 96 bp, Homo sapiens
acctgacagtgtaaagaaggagctcctacaaagaataagaacattccttgctcagcatgccagcctttaagattgaattagattgtgttgttgtgg

SEQ ID NO: 1700 - DNA, 257 bp, Homo sapiens; identical to SEQ ID NO: 1118

SEQ ID NO: 1701 - DNA, 271 bp, Homo sapiens
actgccggagttgaggattactgtgccagtaaatttggagttgtgggttttcatgaatccctgagccatgaactaaaggctgctgaaaaggatggaattaaaacaaccttggtttgcccttatcttgtagacactggcatgttcagaggctgccgaatcaggaaagaaattgagccttttctgccacctctgaagcctgattactgtgtgaagcaggccatgaaggccatcctcactgaccagcccatgatctgcactccccgcctcatgt

SEQ ID NO: 1702 - DNA, 492 bp, Homo sapiens
  misc_feature 362, 413, 454, 466: n = A,T,C or G
cttacactgttgctgctgcctctacgttcaatggcttccagaggccgacgatctactatgtgatgtcagggcctgcgtggcaactcatgcagcaattccagaaccccgacttcccacccgaagtagaggaacaggatgccagcaccctgcctgtgtcttgtgcctgggagagtgggatgaaacgccacagagcagcctgtgcttcggctagtattaatgtgtagatagcactctggtagctgttaactgcaagtttagcttgaattaagggatttggggggaccatgtaacttaattactgctagttttgaaatgtctttgtaagagtagggtcgccatgatgcagccatatggaagactangatatgggtcacacttatctgtgttcctatggaaactatttgaatatttgntttatatggattttattcactcttcagacacgctactcaanagtgcccctcanctgctgaacaagcatttgtagcttgt

SEQ ID NO: 1703 - DNA, 355 bp, Homo sapiens
accatttaagtcagtttcttatttgagtatgaggtgtctatacatttctataatttaagattttggtaacgcttcatatcaaatgagttgtagatctacttaacgtatgacttctcctttcaaagaaggaaggaaggctgacaagggagggagaagggatacctgctaatgatgatgtgctagaaagacgactcattacatgcttatcattgctggaaggacttcttccctccactgagccgtgggatgtcataagagcccttcgaagagctctttttggagttttggagaaagagaatgctcttgtaaccttttttgaagtcttttttattgctcttgatgctctactcaatgt

SEQ ID NO: 1704 - DNA, 350 bp, Homo sapiens
gcaaagacaaagaaacaaactacattggcatttaagccaatcaaaaaaggaaagaagagaaatccctggtctgattcagaatcagataggagcagtgacgaaagtaattttgatgtccctccacgagaaacagagccacggagagcagcaacaaaaacaaaattcacaatggatttggattcagatgaagatttctcagattttgatgaaaaaactgatgatgaagattttgtcccatcagatgctagtccacctaagaccaaaacttccccaaaacttagtaacaaagaactgaaaccacagaaaagtgtcgtgtcagaccttgaagctgatgatgttaagggcagtgt

SEQ ID NO: 1705 - DNA, 484 bp, Homo sapiens
cacagcgcctgcttcctcggccctgaaatcatgcccctaggtctcctgtggctgggcctagccctgttgggggctctgcatgcccaggcccaggactccacctcagacctgatcccagccccacctctgagcaaggtccctctgcagcagaacttccaggacaaccaattccaggggaagtggtatgtggtaggcctggcagggaatgcaattctcagagaagacaaagacccgcaaaagatgtatgccaccatctatgagctgaaagaagacaagagctacaatgtcacctccgtcctgtttaggaaaaagaagtgtgactactggatcaggacttttgttccaggttgccagcccggcgagttcacgctgggcaacattaagagttaccctggattaacgagttacctcgtccgagtggtgagcaccaactacaaccagcatgctatggtgttcttcaagaaagtttctcaaaacagggagt

SEQ ID NO: 1706 - DNA, 281 bp, Homo sapiens
accttcctgtttctcgcgccccggcttttaaaaactccccagctctggtccactactccaccgagatttctcaaaaagtcgccctcggagagtgatcccggggggtgctttgcgaagagggtgcagaaaatgaacggaggagcagctggcttgagggctgggaacactcgcgtgtgtgagagatttaggatgagtttgggaagaaagtgggggcccgaggattctagagagagcacagcccgggctgaggaggggaaagcgcggtggtccggaaatttgag

SEQ ID NO: 1707 - DNA, 332 bp, Homo sapiens
acagcattctggaataaagcaagagtgttcattcacacacacagtagcttcaaaactgttcgatctgtttgttcccatgtagttttctaaagatggaaaaaaaaggactttggtcatcaagactactgtggccatattagattactggaacatctaagcatcagtgtgtgaccatgcgaacaaaagacttcggggagtgtctatttttaaaaaggtttatgtgtgtcgaggcagttgtaaaagatttactgcagaatcaagcccacttttaggcttaggaccaggttctaactatctaaaaatattgactgataacaaaaagtgttctaaat

SEQ ID NO: 1708 - DNA, 237 bp, Homo sapiens
gtaaactgtagttaaagtgtccccactcgagaaaacaggaggcacaatcgaaagtgctttttacacacgtgtgcgcgcacacgcacaactaaaaacgtgattctgatttgttggaaattcttccaacaggaagaatcactgtaagttgttactactaaattaacttggttttatttattttcttttctagccaatactgatgcaagaaaatatttcaattctcaacctgattaatgt

SEQ ID NO: 1709 - DNA, 379 bp, Homo sapiens
acaaagccctaagcatgagtggaaaatcgttgcttcagaaaagacttcaagtaagtatatgacacttgccagattgttttcagcttacctatttttaagaaggagtgttgccaatttaatacctcttaaattgactactcgaggaaaaaactcagaagcaattaaatttggaaaacgagagcagattgttccagtctgggatgtggagactggagtccaattcaggatcatatacacaaaccaaaagtaataattacatcttaaacatggaactcttgtgcttacagataacacttacttgtgcctggctgtgctggatggtatattctgtgtcatttttcttcatgggagaaacagcccacagagctcaccaacaagt

SEQ ID NO: 1710 - DNA, 306 bp, Homo sapiens
acagattatgtgtaacagaacaatggctttttatgatttttttttaacattttaagcagactgctaaactgttctctgtataagttatggtatgcatgagctgtgtaaattttgtgaatatgtattatattaaaaccaggcaacttggaatccctaaattctgtaaaaagacaattcatctcattgtgagtggaagtagttatctggaataaaaaaagaagatacctattgaaaaatgtaagttttatttacagatcaggccacaggttacaaaattaaaaccaacagcagttttgaattatctgt

SEQ ID NO: 1711 - DNA, 210 bp, Homo sapiens
  misc_feature 70, 71: n = A,T,C or G
accccaaaattctgcatagattatttagtataatggtaagttaaaaaatgttaaaggaagattttattannaatctgaatgtttattcattatattgttacaatttaacattaacatttatttgtggtatttgtgatttggttaatctgtataaaaattgtaagtagaaaggtttatatttcatcttaattcttttgatgttgtaaacgt

SEQ ID NO: 1712 - DNA, 585 bp, Homo sapiens
  misc_feature 446: n = A,T,C or G
actcctagaagaaataacaaatttgtcatcccaggtggaagaaaactggacccatttgcaatcactcttcaatcaaagcatgtgtattttaaattatctcaaaagtgctttgttgtaaaaataaatttgtgactaaacaaagactttcatattaaatgggttcaattgaactcatttcttattttccaagtgtcaatgtgaaaagaaaataaatgctagcactactgactagtcagtatatctccactttaaatgctaaatactttcttgaaataaaatcgcacctcccggccaggcatgatggataatgcctgtaattccagcactttcagaggccaaagcgggaggattgcttgaagccaggaatttgagcccagcctgggcaacatagcaagcaagatcccatctctacaaaaagttaaaaaaataaattacacctgcctttngttttgaagacttaaagaatctgctcaaatgatttattttctgagtctcttcacattaacttttatatgatttttaaaaaaattattacctgcttatatttttttgagtatctgtttcatataaagagatgctgcatgt

SEQ ID NO: 1713 - DNA, 366 bp, Homo sapiens
acagcttctcaaatcatgttagaagggtctcacattcaatgatcaagaaattttaaaatagcagtaattattttcattttaagaaaaggttccctttctcccctcccaccccaagtatttaacatgaaagaatgggcttccttacatattaattttatacttatttttgaagcagcaacaattaaccatcaatttggcatttctgtttacagtcgctacaaaaattttttaaatttcacaaagccattatccagtgttgccatgaaacagagactgtaaattctaggtagctaagattctttctgaaaccaatgttaagtcaaagaaatataaagcagggcattacactaagtttctggatctagt

SEQ ID NO: 1714 - DNA, 126 bp, Homo sapiens
gaactgatagttactgttgtgacctgaagttcaccattaaaagggattacccaagcaaaatcatggaatggttataaaagtgattgttggcacatcctatgcaatatatctaaattgaataatggt

SEQ ID NO: 1715 - DNA, 586 bp, Homo sapiens
acacggaataaaagtcctactctctagaacatgagaagtcaataaatagaaaagatatacaaagtggaatgaacataaaaatgactaagcatgtgatcttcacattcatacagtttttcaactaatcttttacaattaaaaagtcatttatttgaaactgtagagttgatatatgccatattagtttggaaccttacaaaacaactttagtggtgttatttatgtgtggagagaaaactgtgtatgtaactatcatgtttcaagggacatgacttaacagtgaagttttttatgttatagggaagaaaacaagtattagtatcagttatcttagaaatgctatctaaactagaatgacatttgttcagtatgatatgttctttccctaactccattctaattgcttaaaaactatcaagtgaagttacaaaagttaaaccactaaatgtggcatcttttcttacacaaagtatcttctcttagaaatgcggtatttaattaagtaaaccttcttggtgaccccagttataatcaaaagaggccacgaaactacagactactgacgaaaagtgtcagtggagacact

SEQ ID NO: 1716 - DNA, 432 bp, Homo sapiens
acacgtctaccctctgcctcagcagatgcgagttgccttctcagcagccagaacctctaatctggcccctggaactttagaccaacctattgtgtttgatcttcttctgaacaacttaggagaaacttttgatcttcagcttggtagatttaattgcccagtgaatggcacttacgttttcatttttcacatgctaaagctggcagtgaatgtgccactgtatgtcaacctcatgaagaatgaagaggtcttggtatcagcctatgccaatgatggtgctccagaccatgaaactgctagcaatcatgcaattcttcagctcttccagggagaccagatatggttacgtctgcacaggggagcaatttatggaagtagctggaaatattctacgttttcaggctatcttctttatcaagattgaaagtcagt

SEQ ID NO: 1717 - DNA, 533 bp, Homo sapiens
  misc_feature 484: n = A,T,C or G
acagtggccctcagattctcagcttgattctaaggaactttcagctggttctcaatttgtaggactcatggcagttctcacagcatgtttttcaagtggctttgctggggtttactttgagaaaatcttaaaagaaacaaaacaatcagtgtggataagaaatattcagcttgtgtctttttccttggagccatccttgtaataacagctacttttttgtatggttatgatcccaaacctgcaggaaatcccactaaagcatagttgtatactatctttaactggtttttcacgatggggcactaggaatctcgacattaatcttgcacagaggacttctacagagtctgagaagatatcatcatgctgaatctgatcatactgttttttaaaagtttaaggataagatatgtgtatatgtaacaaaacacattgcatctagaaatcaaaacttgaaagtatttccagggattaggattagaangaatattagaggaaacttgaaatctgagtttaaaaagatttttaccttt

SEQ ID NO: 1718 - DNA, 586 bp, Homo sapiens
actaggttttctcttacctttgtaatttagaatttattggcagaaattacacacacacacatatatatatataactaaaaaaggtaaatttcagcaaacaaatgcaaacctgtagggtaaatggatttttaaaaaaaattcagtttatcaaatttcatcttctctgccattttagattggcaactattggttatttagaaaatttagactgctgaaagttcatttcttgctccttgaatatgtttaatttctacaaggcttccagttgtgcccgtagcttccttgaggtcattttccactttctcctctgtcactagatatcgtgcgtaagatatttatccttgatttggaaaagcctaaataaaaagcttccgttttgaccttttaatttataaaactccactaggaaatccatttaatttttatgcatgtccacaaaaatattttctttcttaggaatcaaacacttttattggaataaagatccttcaaagtttttaactcttctattagagttttattttgattttccaggactgcaactcggttttccaggcatttcacatattctttcttctttcacctg

SEQ ID NO: 1719 - DNA, 349 bp, Homo sapiens
acggagcaatcgaggaggcataaccacacttggggtggctatagggctggaaaacgctgaagatgactgctttcactgaggtcaaggattgtaatattgccagctttgtaaagtcattaaagcagaagtttcttcagtgatcttctctctaagaaacaccatcacccccatgtgccttacagaggccccctgcgttctgctgcattgcttttgcgcactcccttgatgatgaagatggtcccaataatgatgcccaccagacccacagtcaggcccagggcacacaccacgttctctgtagtctctgggagagggcttggagcatcaaactcccagtgcttgggaagag

SEQ ID NO: 1720 - DNA, 437 bp, Homo sapiens
acataagagccaccttgtaggctaagagtttaacgttgtttaaacacagcgtttgaggcaaacagtagcaacagcagcagcaaatgcaccaaactgacgaaaaggcccagatattttcctcactcatagtcagactgttgtgtctcaccccttacataacatccaagtgagatttctcacagtgctaccttggcaacaaactaaaaatatctagacaaggtcttggtttaagccttattaaaaagctttctttgtgattatctggtatctggtttggtctccagaaaatacatagacttggagataggaaggcctcacaggacttcattctatatctttacagcatttgcaatcaaaactggccagttaaatgctttcgttcacttttgaattttaacagaatataggatatatcagtttggacttgttttttgttg

SEQ ID NO: 1721 - DNA, 436 bp, Homo sapiens
acaaatatgaaaataaatctttatctttaacctcaattttatcttcagcaggagggttgtgcaacttgggtttatgcagatcacatcaagtgttaaataatcaaatgtcacatatgtcatataaagcagcaagtgaaaaaaataaattatgaaaatgcatgggctaaaagttaacagtgaaaaatatctccttatccaacattattttccacaatgaaattaaaatattttacaatgtatcaggatacatttaaaaaaggactgtagtataactatgattttaaaatatcttaaagaaaaacagggacaaggtgaataacttccatagtaatatgcaaatgtatcaagttaagtctaagataaaaacattaaatatttttgttcttactgaaaatgtgctttaaatttgagaacaccttcatgaaatcaaaacgtt

SEQ ID NO: 1722 - DNA, 488 bp, Homo sapiens
  misc_feature 400, 475: n = A,T,C or G
acagatactctactacactcagcctcttatgtgccaagtttttctttaagcaatgagaaattgctcatgttcttcatcttctcaaatcatcagaggccgaagaaaaacactttggctgtgtctataacttgacacagtcaatagaatgaagaaaattagagtagttatgtgattatttcagctcttgacctgtcccctctggctgcctctgagtctgaatctcccaaagagagaaaccaatttctaagaggactggattgcagaagactcggggacaacatttgatccaagatcttaaatgttatattgataaccatgctcagcaatgagctattagattcattttgggaaatctccataatttcaatttgtaaactttgttaagacctgtctacattgntatatgtgtgtgacttgagtaatgttatcaacgtttttgtaaatatttactatgtttttctattaggctaaattnccaacaattttgt

SEQ ID NO: 1723 - DNA, 473 bp, Homo sapiens
  misc_feature 107, 183, 271, 299, 332, 337, 345, 356, 387, 419, 425, 439,463, 470: n = A,T,C or G
cttttttttttttttttttttcatgggggcagacatgtttatttgaaggatggaaaactacattgaagttattttaaaaaatatataagttttactgctgacagaanactgaaagctagtctgaggggaggtggaacagcatgagggaaggtggaacaacacgtgtctaagtgctgcgttaanagggagcctcttgtatgtttggaattgtgagttcctcagtgtgattgcagcctcaagtagactaggaagtaagccagttaggttgganaggtgggcaggggtcaagtgaaatgganaactgtgggctaagcaaaggagtgtgttttttntccancaggcagnggggaccttanacatttgtaagcaagtgagaggcacattcanatttgtggtgtgaggaaaagcgatgccctaanatgcanactcatgccttcanattccagctgctggtaagcaaganacaggcncca

SEQ ID NO: 1724 - DNA, 572 bp, Homo sapiens
acttagcagtgaaatatttataggcaacagattttaagaagtcagttccatggctattaaaaaatgtttaagttaatgaaatttacagtgcatattaaaagcatgatacaaatggaaatttaaaattttgtattaggaagcccagtttgctaaaagtagcattaatatcattcacatcagattttaatttgttacacatttttgtagttcagcaaaggcccctatgatgaaaaacaattaaaaagtgttatgacaaaaataattatctgtgtaaaaagggggagacccaaaagatttttcatatggttatttaattcagttaaatagaactgttatgaatttgagaggaatgaagatattcaaacactaacagaaaatcattagccttatattagagcattcaaatgcttatgtaactcttcaatccatctggcttcataaaaaccaaaattttgaacacaaaaaagtggcagagtttacattaccttttgtatgttcctaagtatgaaattgcatcaatttattatgaattaaatttgaaaagcatcacagatttaaaaacaaagtacctc

SEQ ID NO: 1725 - DNA, 254 bp, Homo sapiens
accttttaatgtgtcaaatttcaaaaaacccatcacaggaaaaaatactgatctgttggatcctttaaaatacagataaatcattttatgttttttttaaaaaaatctgcattaagatattaacaactggctacaattcattacctaataatttaggtaagactgttatttatttttaaaaatccttttagttgggtgaaatccaagaagacttcattcaactaaatgcacttggtgctgctctcaactgttgt

SEQ ID NO: 1726 - DNA, 219 bp, Homo sapiens
ctcaaatactgtgaactatctctaaaacactagaaaaaagaaatgttagtatctcaattacaccaactgtgcaaatgaactttgataaaatagaaataatctacattggcctttgtgaaatctggggaagagctttaggattctagtagatggatactgaatactcaggcccacttaaattattaatgtatacattgtgtttttgtctttatgctatgt

SEQ ID NO: 1727 - DNA, 470 bp, Homo sapiens
actagcactatgatgtctcccagaaggaggctggtcgtgtgtccacctcatcatcagcgttatcttctgatgacaacagagaaggatatggagcgacacattttacgttcacataagtagcgttcacatggacatagtgctccccaatgaaagtagagaagattgctgatatccgggacaccagttcagaaaaggatgggcgcatttcggctttagggtgccagcattttagcattacttcatataaggggtctgggcagtattcgggttgtaggagtcttctcccttgcaacaagtaaacagttatatcaaaggtgtttacatcaggataaggtggggctcctcttgtcatcagctcccagaggagcacgccaaaggaccacacatctgacttggtggtaaacttttgagtttgcagactttccaaagccatccacttcactggcagctttgcacctgttttgttgtgt

SEQ ID NO: 1728 - DNA, 388 bp, Homo sapiens
acatctcatttttgcagaaaagtaggcaggcagaaagaattatacataaaagtttccaaaaggaaaaacaaagaaatatttaatctgatctcttttcttttaaaaaattaattcagtagacttctattttttcctgtgtaacatgggaattcctggctctaaaatggatgaattttcagtgtcagtgtaaagacatcttgttactttctttaaaataaaaactgcagcgtggaaattaatggtgtattacgcatttaaactccagataggcaggaactggaaccaagtgttaagcaatttgcttaattattgacttttcgtaagaaaagtctaggggaagggggagaacagagttgcttttagcctctctctcaagagtttctgctgt

SEQ ID NO: 1729 - DNA, 154 bp, Homo sapiens
actctttaacaactctgcttccttggacgggaattcatgaggtataatacttaaggagattttcatctgtaggttttaggattttcttatcggccatattcaccacccatcctggagcaagaccaaagaaaatctgccttggatccttcctagt

SEQ ID NO: 1730 - DNA, 206 bp, Homo sapiens
  misc_feature 32, 41, 97, 130, 143, 193: n = A,T,C or G
tttttttttttttttttttttttttttaaaanaaataatgnggtagtatttatttagggagagacagatgtgttgccatgttacttagtcatactanagagccagccaagtttgaataatgaaggtgcanacgtgttgtcttnttcactgacaagctgtctgaacaaggagccaggaactgtcgggtcaccanctgtggagtgtgc

SEQ ID NO: 1731 - DNA, 427 bp, Homo sapiens
acttgtaagtgttttggctggaatattctgctataggagaagacggacgtttcgtggagactactttgccaagaactacattccaccatcagatatgcaaaaagaatcacaaatagatgttcttcaacaagatgagcttgattcttacccagacagtgtaaaaaaagaaaacaaaaatccagtgaacaatctaatacgtaaagactatttagaagagcctgaaaaaactcagtggaacaatgtagaaaatctcaataggtttgaaagaccaatggattattatgaagatctaaaaatgggaatgaagtttgtcagtgatgaacattatgatgaaaacgaagatgacttagtttcacatgtagatggttccgtaatttccaggagggagtggtatgtttagcaaccactgaatgtgacttaactatgt

SEQ ID NO: 1732 - DNA, 555 bp, Homo sapiens
  misc_feature 414: n = A,T,C or G
accacattttcttcatccagctttgtgatactaaagaggccagttacttactacacattcaccaaaaatacagtggcaaaacaggaataatgtctctagacattcctgttgaaaaaaatgggaaaatgcacagactaaaagaatgattggtccaccacattttaaaatcccagtggtaaatgttgcaagtcatttgattatattcaacgcctgtgaataattattcatgcctctcatctctgacctctaggctcttcgttctgccttttgagttattcttttttttttttccatgaaatacagctggtaccataaattttttcaatcttagtgtaaaatctgtatctcattgtaggcttctggtcaatacctatacataacaacttaatgtgatctaaccaactcaactgatanaaagctgaattgttcccagtggacaagtggtatttgatgtttagcaggtttttttgttgttatttttttggtaaactctgtggtaaaatctaaaataatgttaaaaccctaaaagtaactattgaatattctgtaatctta

SEQ ID NO: 1733 - DNA, 321 bp, Homo sapiens; identical to SEQ ID NO: 1095

SEQ ID NO: 1734 - DNA, 354 bp, Homo sapiens
accattctggctgagcagtggaacttgtctaggatggtatcgacaatgcaacattattccttatagcaaagatgttgacctaggaatttttatacaagattacaaatctgatattattttagcatttcaggatgcaggacttccgctaaaacacaaatttgggaaggtagaagacagcttggaactatccttccagggaaaagatgatgtaaaacttgatgtttttttcttctatgaagaaactgatcacatgtggaatggaggcactcaggccaaaacaggaaaaaaattcaaatacctgtttccgaagtttacactgtgctggactgagtttgtagacatgaaggtccatgt

SEQ ID NO: 1735 - DNA, 374 bp, Homo sapiens
accttagagttcctggccagagttgactctaggtagtgatgtgattttcttgggatgtttttctaaatattcttttatgctaaagcacatggcttgatacttctgttgattaagctcgtgtctacttacagtcatctagtgagaacctgtggtgtggtgagatgataacttggtctttggtcttcatcatttgaactagttttggttttgtcttgtcccttccttgagcattttgtgtgtgtctaatcctatttggtaaacgaaccactgtgaaagaccaagttggagaaaacagaacacccccaaaacatttattttttttttagaaaatcatggctcactatggtagtatacaatattgttttcacacatgt

SEQ ID NO: 1736 - DNA, 197 bp, Homo sapiens
  misc_feature 38: n = A,T,C or G
gttttaggactttaatgttctttacatattcaacatanaatactgacaatagataaacaataggggaaagacttttcagcaaagtatcactctcgtagtcatacattacaaagaaaacagtagagaacaaaggatagggtaatttaacagaaatgtttagtttaatggcataattgaaaaacaaccaaccaatcaac

SEQ ID NO: 1737 - DNA, 541 bp, Homo sapiens
atctgtgatccagcaagaagggagttccagtcaagagtcactacaactgattagttgtttagagaatgagaaatggaacagtgaggaatggaggccatatttccatgacttcccttgtaaacagaagcaacagaagggacaagaggctggcctctacatcactctcaccttccaaatcttgtggaagtgcatctacttgccagaaccaaattaacttacttccaagttctggctgcttgcaggtggaactccagctgcaagggagttagggaaatgaaggtctttttttaaaagcttctcagccttcctagggaacagacattgggtgagccaatctgcaatttctactacaggcattgagaccagttagattattgaaatattatagagagttatgaacacttaaattatgatagtggtatgacattggatagaacatgggatactttagaagtagaattgacagggcatattagttgatgaaatggagtcatttgagtctcttaatagccatgtatcataattaccaagtgaagctggt

SEQ ID NO: 1738 - DNA, 576 bp, Homo sapiens
acttcttcgatcttcaccttttgtgctgtgattcttcagtttctaaaccagcactgtctgggtccctacaatgtatcaggaagagctgagaatggtaaggagactcttctaagtcttcatctcagagaccctgagttcccactcagacccactcagccaaatctcatggaagaccaaggagggcagcactgtttttgttttttgttttttgttttttttttttgacactgtccaaaggttttccatcctgtcctggaatcagagttggaagctgaggagcttcagcctcttttatggtttaatggccacctgttctctcctgtgaaaggctttgcaaagtcacattaagtttgcatgacctgttatccctggggccctatttcatagaggctggccctattagtgatttccaaaaacaatatggaagtgccttttgatgtcttacaataagagaagaagccaatggaaatgaaagagattggcaaaggggaaggatgatgccatgtagatcctgtttgacatttttatggctgtatttgtaaacttaaacacaccagttgtctgttcttgatgcag

SEQ ID NO: 1739 - DNA, 368 bp, Homo sapiens
  misc_feature 352: n = A,T,C or G
acaaaaaaaagcacattcctagaaaaaggtattggcaaatagtaaaaatgggaggtcaaaagcaaaaaaaaaaaaaaaaaacaaaacaaaaaaaagaaaaaaccaacaattcttcaattcagtgtgcaaacattatataaaaatagaaatactaactctacaagcagtatttcctgataaattatttaaatagcatatctacacaatctgagatatctattccaatggcaatgagaaaataatttataaaaataaagcaatggtataccagatgatagaaaaaaaacataactttcagaaattgtatttaacatttcaatgctatttccttattgggaatacttctctgcanagtttttatgctatgt

SEQ ID NO: 1740 - DNA, 553 bp, Homo sapiens
  misc_feature 546: n = A,T,C or G
acatactatgttcatgatagtgtgatttttttcacatttaagcaggaatgcaatataaaaatgtgaatctcttaattctcaggcatgtgcttattatatttctttttagattgtctatctgtataacacacacacacacacctaagagtctctatttcacaattatatttttgtaaatagtatatgcatttttaatacattggaggctttattttgaactaatttcttagagaatagttatattttctattacacaagtttaaaaatattattaacttgtattttcttaatatacaatctatcttttccacaaatatgagtgggaaataaatcagcacatttgaaagaaagtgttaaaactgaaggcctcacttaattagaaacgtgataaatatatggacaaatggactatacatactataagaggactgtagtttaatactttttacccaaatatgtttaaaaacttcgtgcatttgttacagctcatgttttctatatgaacttagtcattaatgttctttataaaaagtgaaataagatggnaaaataa

SEQ ID NO: 1741 - DNA, 190 bp, Homo sapiens
  misc_feature 12: n = A,T,C or G
actgacttcatnaaagccatctcagagccattgatacaagtcaatcttactatatgtaacttcagacaaagtggaactaagcctgctccagtgtttcctcatcattgattattgggctagctgtggatagcttgcattaattgtatattttggattctgtttgtgttgaattttttaatcattgtgcaca

SEQ ID NO: 1742 - DNA, 269 bp, Homo sapiens
ggcctttccacttggtgatcagcactgagcacagaggactcaccatggaattggggctgagctgggttttccttgttgctattttagaaggtgtccagtgtgaggtgcagttggtggaatctgggggaggcttggtccagcctggggggtccctgagactttcctgtgtaacgtctggattcacatttactgatcattggatgagttgggtccgccaggctccagggaaggggctggagtgggtctcaggtattagtggtagtggtggt

SEQ ID NO: 1743 - DNA, 301 bp, Homo sapiens
acaaacagtatttctggtgtatattttaatgtttttaaaaagagtaatttcatttaaatatctgttattcaaatttgatgatgttaaatgtaatataatgtattttctttttattttgcactctgtaattgcactttttaagtttgaagagccattttggtaaacggtttttattaaagatgctatggaacataaagttgtattgcatgcaatttaaagtaacttatttgactatgaatattatcggattactgaattgtatcaatttgtttgtgttcaatatcagctttgataattgtgt

SEQ ID NO: 1744 - DNA, 169 bp, Homo sapiens
acggaaagaacttaataagatattagaagggagaagcaaaatttctgtcaatgacttcatcataaaagcttcagctttggcatgtttaaaagttcccgaagcaaattcttcttggatggacacagttataagacaaaatcatgttgttgatgtcagtgttgcggtcagt

SEQ ID NO: 1745 - DNA, 266 bp, Homo sapiens
acatggcatttttctgtttatttctcaaagaatttgggtcaacttgtgggaaagtttagaaaatttcacttcagcctcagtagcttgacatctttttagtagtttgaagtgcttaaaatggtgaaaatttctctcgctgtttctttaatgtagtatttttcttaagaaaccgttttttccagaatgaagataaatttcagcttagatcatgcatgaagaaactcgttttaaattggaagagtttatgctaatgatatttatgctgc

SEQ ID NO: 1746 - DNA, 135 bp, Homo sapiens
acttatagtgactctactgtttgaaatactatttttttaaatcaagttttataaaagtgtagaattttggcttttttaagttatgttgttagcacacaggacacttccttgttgtcttttgtggaaagggcaagt

SEQ ID NO: 1747 - DNA, 482 bp, Homo sapiens
acccagcggaggtgcagtgtttaaaaaggatgatattggacgaaggaatgggcaagctccaaatgagaagatgaagcaagtgttaaagaagactatagaagaagccaaagcaataatatctaagaaacaagtggaagccggtgtctgtgttaccatggagatggtgaaagatgccttggaccagcttcgaggcgcggtgatgattgtttaccccatggggttgccaccgtatgatctcatccgcatggagtttgaaaataaggaagacttgtcgggaacacaggcagggctcaacgtcattaaagaggcagaggcgcagctgtggtgggcagccaaggagctgagaagaacgaagaagctttcagactacgtggggaagaatgaaaaaaccaaaattatcgccaagattcagcaaaggggacagggagctccagcccgagagcctattattagcagtgaggagcagaagcagctgatgctgt

SEQ ID NO: 1748 - DNA, 486 bp, Homo sapiens
acagatactctactacactcagcctcttatgtgccaagtttttctttaagcaatgagaaattgctcatgttcttcatcttctcaaatcatcagaggccgaagaaaaacactttggctgtgtctataacttgacacagtcaatagaatgaagaaaattagagtagttatgtgattatttcagctcttgacctgtcccctctggctgcctctgagtctgaatctcccaaagagagaaaccaatttctaagaggactggattgtagaagactcggggacaacatttgatccaagatcttaaatgttatattgataaccatgctcagcaatgagctattagattcattttgggaaatctccataatttcaatttgtaaactttgttaagacctgtctacattgttatatgtgtgtgacttgagtaatgttatcaacgtttttgtaaatatttactatgtttttctattagctaaattccaacaattttgt

SEQ ID NO: 1749 - DNA, 339 bp, Homo sapiens
gagaaaaagatctaaagatcttttattttcatcttttttggttttcttggcatgactaagaagcttaaatgttgataaaatatgactagttttgaatttacaccaagaacttctcaataaaagaaaatcatgaatgctccacaatttcaacataccacaagagaagttaatttcttaacattgtgttctatgattatttgtaagaccttcaccaagttctgatatcttttaaagacatagttcaaaattgcttttgaaaatctgtattcttgaaaatatccttgttgtgtattaggtttttaaataccagctaaaggattacctcactgagtcatcagt

SEQ ID NO: 1750 - DNA, 259 bp, Homo sapiens
acctacttcagatgaacgaggcgcaagacaaaatccaggacttgcctatggaaacccatattctggtatccaagaaagttcttcccccagcccgctctccatcaagaaatgccctatctgcaaagcaaatgatatttgcgatcacaccttggagcaacagcagatgcagcccctttgtttcaattgtccaatttgtgacaagatcttcccagctaccagagaagcagatctttgaagaccacgtgttctgccactctct

SEQ ID NO: 1751 - DNA, 257 bp, Homo sapiens; identical to SEQ ID NO: 1267

SEQ ID NO: 1752 - DNA, 76 bp, Homo sapiens; identical to SEQ ID NO: 1488

SEQ ID NO: 1753 - DNA, 359 bp, Homo sapiens
acaacatttaaaatactatatttagtaatccagaagctactgggcacctccttcatctaccatgactgcattgcaaaactccaaatcggaacagcctcttgctataaaaaccgtgctaacgtgtcagggaagtccccgagtaattcagaagctagaatccatttgtgcccacaagcagtgttggtcttcccaaaataggccctcaagaatgccactttcctcttacagcctcgctgcctaaactgactgttggcataacctgagaatttgggggcaatcagcaaagtggggaataggcaggacatttttctaaatgtattgatttgtttatttggatgtttatcaatagataccgaagt

SEQ ID NO: 1754 - DNA, 594 bp, Homo sapiens
  misc_feature 216: n = A,T,C or G
acccaaatgtgtttgggattggggactgcaccaaccttcctacgtcaaagactgctgctgcagtagctgcccagtcaggaatacttgataggacaatttctgtaattatgaagaatcaaacaccaacaaagaagtatgatggctacacatcatgtccactggtgaccggctacaaccgtgtgattcttgctgagtttgactacaaagcagagccgntagaaaccttcccctttgatcaaagcaaagagcgcctttccatgtatctcatgaaagctgacctgatgcctttcctgtattggaatatgatgctaaggggttactggggaggaccagcgtttctgcgcaagttgtttcatctaggtatgagttaaggatggctcagcacttgctcatcttggatggcttctgggccaaaactgcagtcactgaatgaccaagagcagcacgaaggacttggaacctatccttgtaaagagttccttgatgggtaatggttgaccaaatgcctcccttttcagtacctgccccgggcggccgcccgggcaggtacaataaataattatttaaaagtcatagctccagtcactactgaaa

SEQ ID NO: 1755 - DNA, 352 bp, Homo sapiens
acaatacagaaaatacaggtcagttctggaccaaaataattgcattaaaatacaaaaggtgatagggaagaattaaaagatttgcagtgactgcttttggtggtcagctacaacaagccaacaaccctcagctattttggaaagtgaaggtgagtcttaatttgcagataatgaatgtcttcggtagtttaaaaaaaatataaactctaaaaaagctcgtgaatcatatacaaaagcagctatttgagaccaaggttgaacaccagaaattgtgttagcaccaccagcaagcacagggtcctctgactcttccgccctcctatcttgtgcagaatgcagacttgaatgttgt

SEQ ID NO: 1756 - DNA, 159 bp, Homo sapiens
ctcgcccagctcgcccagcgtccgccgcgcctcggccaaggcttcaacggaccacaccaaaatgccatctcaaatggaacacgccatggaaaccatgatgtttacatttcacaaattcgctggggataaaggctacttaacaaaggaggacctgagagt

SEQ ID NO: 1757 - DNA, 255 bp, Homo sapiens
acagaaatagtaattagcaatgttctgctgaaggagaaagatgtttatctgaaaaagctggttaactattaaataacacattttcttttgaatttttaaaggaagtataataaaattgaccaataaacttttcacgaccataagcttctatataaaaaatttgatttaggtttatcttaatattctaaaaaagtatttgcactctaaaataggtctgggagttaaaatcatgtaggctgtttttcagtcttgtgt

SEQ ID NO: 1758 - DNA, 581 bp, Homo sapiens
acaggcattggcacattttaaaaacaaactacataaacagatctttcctataacctaggaaagtggaatgtcagaagtcaacaaaatgtgataaacttaaagtgctaaaacagaaggcacttcacaaaatctgttcactgaaacagttatatatcctcgtttacatccttcactttacaagtggcagtgaacgtctgtttggatagaaggacatacagaaatacaggcagtttagtggcagtaaaaatataagacaagtaatgagtccttggccaacttgtttttgatgacctgtagtgtcctttaactttcctccttaagaagaaaaaacagaaggattcacaattagaagaaaagttgaaatccagaatatagttacttttgggagtggggacgtttgtggatattaaatcacttatcccctaaagcaatcagagccctttgtttttatggttgaagttttgtgaagtaaagaaagtattagggaagaacacttcagaatcagtgaactaaaaaaggtgttacattcattattttaaatatttaggttattaagaagtctaaaatgttacacagttaga

SEQ ID NO: 1759 - DNA, 147 bp, Homo sapiens
actacgtgccagctctagttttcagccttgggaggttttattctgacttcctctgattttggcatgtggagacactcctataaggagagttcaagcctgtgggagtagaaaaatctcattcccagagtcagaggagaagagacatgt

SEQ ID NO: 1760 - DNA, 477 bp, Homo sapiens
acattgaaaaaaggaaagacatttcttcataccaacctttccctagttcgcagtttctgaatagtagaaacaaaacacatttttaaatctttctatcaatttaatttaggacgaagtaacacaacttttataattaaccactgaagttgtctttaaggacaaaacttaaattttaaaatgggtgttaccatattttatgagtggactgactccaaggttgccttgctccaagtctgggcatcgtgacattgccgtgatgcccagaagaaagttaatggcaatgatgtccagtcagagggcagacatgctacacatcacaatgatgagagctgcggattctgccctcttcaactccaagtagaaaattattattttcattcaaactaactggaagtgagccaaacagttaaaaagtcagaatgaagaataaaacaattttcttttcacatagaggagggacactccttcagccccgtc

SEQ ID NO: 1761 - DNA, 345 bp, Homo sapiens
acacttgaaaccaaatttctaaaacttgtttttcttaaaaaatagttgttgtaacattaaaccataacctaatcagtgtgttcactatgcttccacactagccagtcttctcacacttcttctggtttcaagtctcaaggcctgacagacagaagggcttggagattttttttctttacaattcagtcttcagcaacttgagagctttcttcatgttgtcaagcaacagagctgtatctgcaggttcgtaagcatagagacgatttgaatatcttccagtgatatcggctctaactgtcagagatgggtcaacaaacataatcctggggacatactggccatcag

SEQ ID NO: 1762 - DNA, 219 bp, Homo sapiens
  misc_feature 11, 117, 118, 144, 156, 157, 167, 168, 180, 181, 182: n = A,T,C or G
actgccaccanattttttattacatcatttgaaaattagcagtatgcttaatgaaaatttgttcaggtataaatgagcagttaagatataaacaatttatgcatgctgtgacttagnnctatggatttattccaaaattgcttngtcaccatgcanngtctgtattnnttatatatgtgnnnatatatacataatgattataatacataataagaatga

SEQ ID NO: 1763 - DNA, 292 bp, Homo sapiens
  misc_feature 11, 12, 45, 192, 250: n = A,T,C or G
actacaaatgnntgccataaaacctactatactcgtcacacaggntttaagactttgcaagaattgtcatcaaatgatatgcttttacttcaacttagaactggaatgacactttctgggaacaatacaatttgctttcatcatgtaaaaatttacattgacagatttgaggatttacagaagtcatgttgngacccatttaacatacacaagaaattagccaaaaaaaatttgcatgtaattgacttanatgatgccacttttctgagtgctaaatttggaagacagcttg

SEQ ID NO: 1764 - DNA, 150 bp, Homo sapiens
gcaactccatgcaaaccatccaaaagaccaccacccgccggatagtggatggcaaagtggtgtctgagaccaatgacaccaaagttctgaggcattaagccagcagaagcagggtatcctttggggagcccgaagccaataaaaagttca

SEQ ID NO: 1765 - DNA, 463 bp, Homo sapiens
  misc_feature 9, 321, 344, 402: n = A,T,C or G
actgcaacnactgctatctcagattcaaatctggacggccaaccgccatgtgatgtaagcctccatacgaaagcactgttgcagatagaagaagaggtggttgctgctcatgtagatctataaatatgtgttgtatgtcttttttgctttttttttaaaaaaaagaataactttttttgcctctttagattacatagaagcattgtagtcttggtagaaccagtatttttgttgtttatttataaggtaattgtgtgtggggaaaagtgcagtatttacctgttgaattcagcatcttgagagcacaagggaaaaaataanaacctacgaatatttttgaggcngataatgatctagtttgactttctagttagtggtgttttgaagagggtattttattgntttttaaaaaaaaggttcttaaacattatttgaaatagttaatataaatacataattgcat

SEQ ID NO: 1766 - DNA, 336 bp, Homo sapiens
acatattcaccttgaagaggaagacggggcggaagaccaagatcatcgagatgatgccagaattccagaaaagttcagttcgaatcaagaaccctacaagagtagaagaaattatctgtggtcttatcaaaggaggagctgccaaacttcagataataacggactttgatatgacactcagtagattttcatataaagggaaaagatgcccaacatgtcataatatcattgacaactgtaagctggttacagatgaatgtagaaaaaagttattgcaactaaaggaaaaatactacgctattgaagttgatcctgttcttactgtagaagagaagt

SEQ ID NO: 1767 - DNA, 553 bp, Homo sapiens
actagtgatattttgggtgttttttttaaatgaatgtatatactttttttttgaagagtggagagtagtgatgtctagagggagctattttgtgctgaggccactatgttctgtaaatatataattttaagagcaacctcacaatccctgctaagtggagtttattatttgaagactaaaatggaattccatagttcctgataggttatattctgagttattattctgagttatctacaaacatttttgagatttgtctttacactctgattgtagtttccagcagcccatgcacactgccaagtaagtctcattttttcctgttagaaatggtgaaatatcatataatcacttataaagaaaactgatatgaaaaaattttagagttgtttgctttatggtcactcaagtagggtaagtgttccacaaattccacaagttgatagtttaacatggatgtctgaaagccacatatataatttcttaggattcttaaattagtaaatctagcttactgaagcagtatttagcatcactattttagattgcaaaa

SEQ ID NO: 1768 - DNA, 501 bp, Homo sapiens
acactttgagacgcaggaagcagctgaaagagctattgaaaaaatgaatggaatgctcctaaatgatcgcaaagtatttgttggacgatttaagtctcgtaaagaacgagaagctgaacttggagctagggcaaaagaattcaccaatgtttacatcaagaattttggagaagacatggatgatgagcgccttaaggatctctttggcaagtttgggcctgccttaagtgtgaaagtaatgactgatgaaagtggaaaatccaaaggatttggatttgtaagctttgaaaggcatgaagatgcacagaaagctgtggatgagatgaacggaaaggagctcaatggaaaacaaatttatgttggtcgagctcagaaaaaggtggaacggcagacggaacttaagcgcaaatttgaacagatgaaacaagataggatcaccagataccagggtgttaatctttatgtgaaaaatcttgatgatggtattgatgatgaacgtct

SEQ ID NO: 1769 - DNA, 348 bp, Homo sapiens
  misc_feature 305, 316: n = A,T,C or G
acccatcctggatgccaatcagctggaagtcattccttttgatgttggggacatccatattatgagttgacgggcagatatcttcatatttcttcccagtaaagatgtcaataccaaccagatggaccttggcgtggccgtgcttgccagtcttcgaagtagacatctcgacgatcttacatggccggcctttgagcaccacaaagccattcttacgtaatgctgagcactgcattgggaaggtggctgaggcccctgcatctcctgtctcgaagtccaagtcatctgccattttaagaggcttngattccaactngcgcgaacgcactgactcgaccccgtacctcg

SEQ ID NO: 1770 - DNA, 423 bp, Homo sapiens
  misc_feature 191, 196, 197, 204, 236, 359, 380: n = A,T,C or G
actgagatacatggggccgaaaaggggtaatatggccatcttttatcagaaaaagtgacaaaacgggaatttaaaaaatgaattttccatctgactttatttccaaatacactttcttttttaaaaaaccaatacactttctttgaggatgacagtattaggaaatccaattatacaaaaaatactacatntagtnnggggtanatatatttatttgttggtaacatacattaagnggcactaattacacagtaactataaggtaactaacatgaaaccacagaactgtaactctgccacagctgcatgaacttgggcttttctggttgagcccattttcaaaaaactgcccaccccanagctatgccaacaaaatctgntacggagtaaagccctgaagtggtgactcaccaggagtacctg

SEQ ID NO: 1771 - DNA, 541 bp, Homo sapiens
acacttgaaaccaaatttctaaaacttgtttttcttaaaaaatagttgttgtaacattaaaccataacctaatcagtgtgttcactatgcttccacactagccagtcttctcacacttcttctggtttcaagtctcaaggcctgacagacagaagggcttggagattttttttctttacgattcagtcttcagcaacttgagagctttcttcatgttgtcaagcaacagagctgtatctgcaggttcgtaagcatagagacggtttgaatatcttccagtgatatcggctctaactgtcagagatgggtcaacaaacataatcctggggacatactggccatcaggagaaaggtgtttgtcagttgtttcataaaccagattgaggaggacaaactgctctgccaatttctggatttctttattttcagcaaacactttctttaaagcttgactgtgtgggcactcatccaagtgatgaataatcatcaagggtttgttgcttgtcttggatttatatagagcttcttcatatgtctgagt

SEQ ID NO: 1772 - DNA, 201 bp, Homo sapiens
acaaagttggctatgtgaccctgatgcaatggagcagggagaaacacctttaacaatgcttcagagtcaggttcccaacattgttaaagctcttcacaaacagatgaaagaaaaaagtgtgaagacccgacagtgttgttttaacatgttaactgagctggtaaatgtattacctggggccctaactcaacacattcctgt

SEQ ID NO: 1773 - DNA, 505 bp, Homo sapiens
gttttttgaagacagacacagtgcaatcaaactgaggccgaaggaaggggagacatactttgatgttgtggctgtcgttgaccctgtcaccagagaagcacagagacttgctcctttgctcttggttttggctcagctgataaacatgaatctgagagtatttatgaactgccaatccaaaccttctgacatgcctttaaaaagcttttaccgttatgtcttagaaccagagatttctttcacttcagacaatagttttgctaagggtccaatcgcaaaatttttggatatgcctcagtctccactgttcactctgaatttgaacacacctgagagctggatggtagaatctgtcagaacaccatatgatcttgataatatttatttagaagaggtggacagtgtagtggctgctgagtatgagctggaatacctgttactggaaggtcattgctacgacatcaccacaggccagcctccacggggactacagtttaccttagga

SEQ ID NO: 1774 - DNA, 446 bp, Homo sapiens
gcaaattccagtgtgcagaccacaacctcaaaacaaaaaagatctatttctactggatctgcagggagacaggtgccttttcctggttcaacaacctgttgacttccctggaacaggagatggaggaattaggcaaagtgggttttctaaactaccgtctcttcctcaccggatgggacagcaatattgttggtcatgcagcattaaactttgacaaggccactgacatcgtgacaggtctgaaacagaaaacctcctttgggagaccaatgtgggacaatgagttttctacaatagctacctcccaccccaagtctgtagtgggagttttcttatgtggccctcggactttggcaaagagcctgcgcaaatgctgtcaccgatattccagtctggatcctagaaaggttcaattctacttcaacaaagaaaatttttgagttata

SEQ ID NO: 1775 - DNA, 251 bp, Homo sapiens
  misc_feature 8, 10, 198, 199, 214: n = A,T,C or G
aagagttnancggaaaggggaaaggatgataaagacaatgtcatgagatgtcagagaaaatactaatttcataatgcagctcaacaatagaaatcaatttcaaaatgaaatatgatgcataaactaagattaaagttagttaatgtggctgggcatagcagatgggactcttagaagaggtggcctccagggtggcanngccattgccctggcntcaggctcctgttccctcctgggcccaccaagttcac

SEQ ID NO: 1776 - DNA, 204 bp, Homo sapiens
acacactttcatttagtaattaaattttagtcagattttgcccaacctaatgctctcagggaaagcctctggcaagtagctttctccttcagaggtctaatttagtagaaaggtcatccaaagaacatctgcactcctgaacacaccctgaagaaatcctgggaattgaccttgtaatcgatttgtctgtcaaggtcctaaagt

SEQ ID NO: 1777 - DNA, 351 bp, Homo sapiens
  misc_feature 14, 15, 218, 219, 309: n = A,T,C or G
aatacattctcatnntacaaaggcaatttaatggaagaatcttccttttgatatttgaatcatctgaaataacacaaacagaacaatacattcaaagaaatctcatttgcataacaaaaagacaagttaaacaacaaaaaaatttttcctttctcacaggtggacattgaagtggacctaattcggttttccttttaaaagccccgcaaacaaaagtnngtttaaaacctatttaaaatgaataaaaaattggtttactaaactactggtctccagcaccattttctgttttctgttgtttggatgcangttcttctttgtctagtttcttctcttgctcttttcacaggt

SEQ ID NO: 1778 - DNA, 344 bp, Homo sapiens
tcctgttcgacagtcagccgcatcttcttttgcgtcgccagccgagccacatcgctcagacaccatggggaaggtgaaggtcggagtcaacggatttggtcgtattgggcgcctggtcaccagggctgcttttaactctggtaaagtggatattgttgccatcaatgaccccttcattgacctcaactacatggtttacatgttccaatatgattccacccatggcaaattccatggcaccgtcaaggctgagaacgggaagcttgtcatcaatggaaatcccatcaccatcttccaggagcgagatccctccaaaatcaagtggggcgatgctggcgctgagt

SEQ ID NO: 1779 - DNA, 414 bp, Homo sapiens
attttttttagtagagatggggtttcaccgtgttagccaggctcatcttgaactcctgacctcaggtgatctgcctgccttggcctcccaaagtgctgacattacaggtgtgagcccctgtgcctgaccaaagtgaatgctttctaatccatttctgcttggagccttgaataaacatacataagggattctgatgaaaatgtccagaatgagactctggcatctgcatttttaacaagctcttaggtgactctgctttatatccagagttgaaggcccctggtctagacagggtatctaagaatcaccagggtaaagaagaatttttccaatacatttctggttccctaaaaagatattgtctggagaaaatcatgtagttggaaatgtgcttgcgagggattggaggctgtt

SEQ ID NO: 1780 - DNA, 392 bp, Homo sapiens
  misc_feature 14, 16, 282, 298, 315, 329, 368: n = A,T,C or G
acaagtctttgatngnagtagagtataagcctgtgtcggccactggagctgaggacaaagataagaagaagaaagaaaaagaaaataaatctgaaaagcagaataagcctcagaaacaaaatgatggccaaaggaaagacccttctaaaaaccaaggaggtgggctctcatcaagtggagcaggagaagggcaggggcctaagaaacagaccaggttgggtcttgaggcaaaaaaagaagaaaatcttgctgattggtattctcaggtcatcacaaagtcangaaatgattgaatacncatgacataaagtggcntgttatattcttcngtccctgggcctatgccatttgggaagccatcaaggacnttttttgatgctgagatcaagaaa

SEQ ID NO: 1781 - DNA, 195 bp, Homo sapiens
acttgttgttgctttgtttggagggtgtggtggtctccactcccgccttgacggggctgctatctgccttccaggccactgtcacggctcccgggtagaagtcacttatgagacacaccagtgtggccttgttggcttgaagctcctcagaggagggtgggaacagagtgaccgagggggcagccttgggctgac

SEQ ID NO: 1782 - DNA, 385 bp, Homo sapiens
actcaacctaagttcggttccgatgaattcttatcccctgccccttcctttaaaaaacttagtgacaaaatagacaatttgcacatcttggctatgtaattcttgtaatttttatttaggaagtgttgaagggaggtggcaagagtgtggaggctgacgtgtgagggaggacaggcgggaggaggtgtgaggaggaggctcccgaggggaaggggcggtgcccacaccggggacaggccgcagctccattttcttattgcgctgctaccgttgacttccaggcacggtttggaaatattcacatcgcttctgtgtatctctttcacattgtttgctgctattggaggatcagttttttgttttacaatgtcatatactgccatgt

SEQ ID NO: 1783 - DNA, 192 bp, Homo sapiens
  misc_feature 172: n = A,T,C or G
aagatccatgctaaattccccatcctgcagcagtgagtcccggatcaccgaacatttctggcccccaagtgtcagcccattcacgtaaaaacttgaccggtctttgccaaccaggacacccacctcagctggcgtgatgttgacgaacgttttcccggggacggcggcccanacggagggcgagtccttgta

SEQ ID NO: 1784 - DNA, 602 bp, Homo sapiens
actgccgcaaggcttcacagacagcccccattacttcagtcaagcccaaatttcatcctcatctgttacctatctcagcataattctcataaaaacacaggtgctctccctgctgatcgtgtccgattaatctcccaaacctcaatcccttacaaaagaacaactcctttccttcctaggcatggttagtgtggtcagaattcttacacaagagccaggactgcaccctgtagcctttctgtcgagcacatcaaggcttatgtcaccaaatcccccgttgatgcaggcaaagctgtgattgtcattcaagatatatttggctggcagttgcccaataccagatatatagctgacatgatctcaggaaatggatacacaaccattgttccagacttctttgtagggcaagagccttgggacccctctggcgactggtctatcttccctgagtggctgaaaacaagaaatgcccagaagatcgatagagagatcagtgctatcttgaagtatctgaaacaacagtgtcatgcccagaaaattggcatcgtgggattctgctggggtggaactgctgtccatcatttgatgatgaaatactcaga

SEQ ID NO: 1785 - DNA, 250 bp, Homo sapiens
acaaccgcttgggaaaagatccgtttcttagcaaactaaacctatacctaccatataatctaagaattcgaatcctaggtatttctcaagagaaatgatattatttagattccatttatacgaagttctgaaacagaaaactaatctgcggtgggaaaacagttaagacagctgttgccttgagagggtgtgaatggagaccgactgagaagagacatgaggcaactccaaagtgatgcttatagtctgt

SEQ ID NO: 1786 - DNA, 91 bp, Homo sapiens
  misc_feature 62, 63: n = A,T,C or G
acttgtggaagatggccacgaggaggccaatggcctgatccagggggcatgccatggctganngctgggcttggagcggtagggaggcggc

SEQ ID NO: 1787 - DNA, 370 bp, Homo sapiens
gcgcagcagctgtgcccggcagtctagaggcgcagaagaggaagccatcgcctggccccggctctctggaccttgtctcgctcgggagcggaaacagcggcagccagagaactgttttaatcatggacaaacaaaactcacagatgaatgcttctcacccggaaacaaacttgccagttgggtatcctcctcagtatccaccgacagcattccaaggacctccaggatatagtggctaccctgggccccaggtcagctacccacccccaccagccggccattcaggtcctggcccagctggctttcctgtcccaaatcagccagtgtataatcagccagtatataatcagccagttggagctgcaggggt

SEQ ID NO: 1788 - DNA, 249 bp, Homo sapiens
acactgaagcagaaccggaaacacccaggaactgttcagaaatctcagaagaaatctgcttctcttcgatggaaagatataattaacgatcaaagagctctaagaaaattgcaaagaagccttaatgttcaagctttagaaagatcagagcaatttttctctttcagtccaaactaagactctctgtatttaaatctctctggggcaagagggctagatttcctcattttgttatgagactagattggt

SEQ ID NO: 1789 - DNA, 346 bp, Homo sapiens
acagagagaggaagaagctattcagttggatggattaaatgcatcacaaataagagaacttagagagaagtcggaaaagtttgccttccaagccgaagttaacagaatgatgaaacttatcatcaattcattgtataaaaataaagagattttcctgagagaactgatttcaaatgcttctgatgctttagataagataaggctaatatcactgactgatgaaaatgctctttctggaaatgaggaactaacagtcaaaattaagtgtgataaggagaagaacctgctgcatgtcacagacaccggtgtaggaatgaccagagaagagttggttaaaaaccttggt

SEQ ID NO: 1790 - DNA, 529 bp, Homo sapiens
  misc_feature 233, 249, 393, 441, 516: n = A,T,C or G
acatgccctttatgaagatattcttgagggaaaacaccaccaagcaagtgaaacacataatgtgattgcatcagacaaagcagcagaaaaatcagttgtccatgaacatgagcacagccacgaccacacacagctgcatgcctatattggtgtttccctcgttctgggcttcgttttcatgttgctggtggaccagattggtaactcccatgtgcattctactgacgatccanaagcagcaaggtctancaattccaaaatcaccaccacgctgggtctggttgtccatgctgcagctgatggtgttgctttgggagcagcagcatctacttcacagaccagtgtccagttaattgtgtttgtggcaatcatgctacataaggcaccagctgnttttggactggtttccttcttgatgcatgctggcttagagcggaatcnaatcagaaagcacttgctgggtctttgcattggcagcaccagttatgtccatggtgacatacttaggactgagtnagagcagtaaaga

SEQ ID NO: 1791 - DNA, 379 bp, Homo sapiens
accccgccatggccgccatcaatgcacgcaagatgaaatttgctctgctaaaaggctccttcagtgagcaaggcatcaacgagtttctcagggagctctcttttgggcgtggctccacggcacctgtaggaggcggggctttccctaccatcgttgagagagagccttgggacggcagggatggcgagcttcccgtggaggatgacattgacctcagtgatgtggagcttgatgacttagggaaagatgagttgtgagagccacaacagaggcttcagaccattttcttttcttgggagccagtggatttttccagcagtgaagggacattctctacactcagatgactctaccagtggccttttaaccaagaagtagt

SEQ ID NO: 1792 - DNA, 283 bp, Homo sapiens
acccttggggaacacaaatacacttagcatataatgtagccagtaataactagcaccacagctacatggaaatcctttacatacaccaacttggctttcacttttaaaacaaaactcagaatccatggctcagtaggataactataattgtgttgctctgctttttaacaggtctacataagttaatagcactagcaaaaatcaaagaatagcttcagacctcttacaagtttaggagacagtgctagtgaccacaaatagactcactacctgatgtccaagt

SEQ ID NO: 1793 - DNA, 340 bp, Homo sapiens
acatggtgacttgggttttgtttctgcatctgtcacttggcgaatgaagataccatcttcaggatgttctgtgtcatccatttcatacatatatgatgacgctattacaagcgtagtcccatcattactgaaggcaagtgatgcgatgctcgtggggtaccgatggaattggcacagtcgctttttgttaaatggatcccaaatatttacaaagccatcagaaccacctgtggcaaatgtattgtggatattgtgaaaagaaatggcattgactgggtaaatctgctcaatattattttcttttagtctgtgacatttgaaggcatacttcttcttctgt

SEQ ID NO: 1794 - DNA, 345 bp, Homo sapiens
acattcacaacttatgtttctttgagattaatagatattgggggaaaaacgcctttttaggaaaattatagtgaaaatttgacagttgattggcataatttcttgtttgaatgctgcctccattatataggtccttccaggaactcaaacactgtaagtgaaatatgggagtatagtttttattatttcttcttttccttttgttttcataatataatgcagtttgttcaggaaatcagcacaaagcctgatagtacacactgtgacctgatcatcctgaaaaactttatgggggagaaaggtcaacagcttctctttctttttcttgaaaataataaaactgcg

SEQ ID NO: 1795 - DNA, 256 bp, Homo sapiens
  misc_feature 228: n = A,T,C or G
cgcagccatgagtatgctcaggcttcagaagaggctcgcctctagtgtcctccgctgtggcaagaagaaggtctggttagaccccaatgagaccaatgaaatcgccaatgccaactcccgtcagcagatccggaagctcatcaaagatgggctgatcatccgcaagcctgtgacggtccattcccgggctcgatgccggaaaaacaccttggcccgccggaagggcangcacatgggcataggtaagcggaagggt

SEQ ID NO: 1796 - DNA, 178 bp, Homo sapiens
  misc_feature 12, 72, 73, 104, 105, 117, 126, 146: n = A,T,C or G
acctgtcacacnacgtccacctggtgtgcgaggagacagccaattacctggtcatttggtgcattgacctannggtggaggagaaatgtgcactcatggagcanngtggcccaccanacaatcgtnatgcaatttatcctggagcntggccaagagcctaaaggtggacccccgggcc

SEQ ID NO: 1797 - DNA, 313 bp, Homo sapiens
accttacatttagttaaatataaacatttgttatttatacataaaactgctttcaaaaaacaactaataaatgatttaattgcacttgttttacttcttgtaattcccaagtgttaacttttcttagattgaaatcaactgtcccctagtgcacttttatttttagttcgtgtcctaataaattcaaacctttaaaagtcccatcacctaatgcataaatatacaaaaatgccaaaaattaatcccttttagttggatcatattttatgctgactttttatagccaaataaccagaaatggtttccttctgca

SEQ ID NO: 1798 - DNA, 447 bp, Homo sapiens
gctcaacattgacatcccccgatctaggattactctggacctcattcgggtgttatgagtatcccacgaaggccagacgctgattttattttctcatttccacagattgacaaggataagtcagttgtttgtaaactctaggtagcagatgagaaataattcacttaatatcagaaatattttccaaacactttcctttattttttcttctgaataaatagaaaaccaacagtttgatttccttttcccttaaaggaaacaactaatacacattcttatatggctttatgtagtaatagttttctgactaaaattttgttttttattttttgtaatttatctttaactccttttgcattttgtataacagattgcttaacttctacttgccaacatctgccttgctggacttgtatgggattgtcttcttgatttgaattgtacctc

SEQ ID NO: 1799 - DNA, 321 bp, Homo sapiens
actgaatacttcggcaaacttattgggtcttcattttctgacagacaggatttgactcaatatttgtagagcttgcgtagaatggattacatggtagtgatgcactggtagaaatggtttttagttattgactcagaattcatctcaggatgaatcttttatgtctttttattgtaagcatatctgaatttactttataaagatggttttagaaagctttgtctaaaaatttggcctaggaatggtaacttcattttcagttgccaaggggtagaaaaataatatgtgtgtcgttatgtttatgttaacatattattaggt

SEQ ID NO: 1800 - DNA, 422 bp, Homo sapiens
  misc_feature 271, 303, 355, 362: n = A,T,C or G
acatgtttggaaatgagttagatacttgaaaagtctaaacacactgatttaggagtgcgtatgttgctgtctcaatgaacaatgggtcaatagttcatatggactaaattaatctctgggtagcacgtatgtgtgtaaatataaaattatattagacattagcaccagtgcagaacatgctcagcatcataagatccaaaacaccagcacaagtttatccatcattaaaaacaattacctccttcccaaaatgtcagaatagtaggtaacntgagattaataaatcttatccaaaaagtaacntcttataacataaaagtttcttttagaagtatatgtgaggaaccaatcagcntaaatangaaatgttttaaggattgaagatgtccaatattttttaaaactggacattaccatataca

SEQ ID NO: 1801 - DNA, 429 bp, Homo sapiens
  misc_feature 407: n = A,T,C or G
acagtaatttgcagtaactacagatactgttccacagtatatataattatgactgataagatgtagagcattaaatttagagttagcttattctgataagtcaatattagactgttcattaactctgcattaactatagaaaggttgttagttaatgcttatttaaaaaccccaaaccattccatttacaagagaaattgttgcaaatgtataaaacagcagatatacaaggagaacaccaaacatactttattagcacaaaaaaagcagccataacaaggcacagcaagcagaaacatacattagcagtcaaaaggttagtgttgcatacaaatatagctttccttttttgtagccttggcaatagccatagggatgtaaaataacattctgtagcagcaggtaangaaactatggagcactcaccag

SEQ ID NO: 1802 - DNA, 311 bp, Homo sapiens
acaaaacaacaaaatatatatatattctcatatatatatatatagctgataaaattacctgaggagtgtaatgcttatttttttgtgtatatctttgcaatctattttatatatattgacaaaagagactgtgaaatacttagccatgcagaatatgtgaccagaccagagcatgtgtaggaagactttacggtaatcatcaactctaccccgaaatgatggactacaagttataatgtgtgttacctacacttcaatcagtaatattagcaaatctccaaatgttagtcacattggtttgtctcccttgt

SEQ ID NO: 1803 - DNA, 279 bp, Homo sapiens
acaaaaaaaccttacataaattaagaatgaatacatttacaggcgtaaatgcaaaccgcttccaactcaaagcaagtaacagcccacggtgttctggccaaagacatcagctaagaaaggaaactgggtcctacggcttggactttccaaccctgacagacccgcaagacaaaacaactggttcttgccagcctctagagaaatcccagaacactcagccctgacacgttaataccaaggggaacagttaacttcaatacaaggtcaaaatcagcaaca

SEQ ID NO: 1804 - DNA, 200 bp, Homo sapiens
  misc_feature 12: n = A,T,C or G
acaatttaattntgcttccagtctcaagcacttaagaacaatttttggaatctttcaggttaactaaaaaggttatatcaacaagcaaaactcccaaaagattaggtaagaaaaaattagttaactgctttaaaaatatccaactcactttcttcattgattaggagtaactgggaaatatctctgtcctgataacttgg

SEQ ID NO: 1805 - DNA, 310 bp, Homo sapiens
  misc_feature 40, 41: n = A,T,C or G
acatcacctgctgaggaaggataaatcttcctgctttaanngagccctgtcatctctcctcttaatgcacgtttcccttggtattagtggaagctgtgttcaagatgggaagcccttcctgcagttcttagaaacacctgctttctaaggagagccttttctaggattagcttatgtgtgttttctctaggcgattttttatttcagttaccaatttaattttcaagttgacagatgctgtgtaaagtctctcataatgagagtagtccattaaattgttgaaagttgcactgcttttcatctttcaggt

SEQ ID NO: 1806 - DNA, 293 bp, Homo sapiens
  misc_feature 14, 140: n = A,T,C or G
actcatttcaatgngttgccgtgccactaagcagttccatcttccactggattcatcatagtcacaaatatccatgaccgaatagttctgaatcctcctgagccactgcaaagaaattctttcttgtgttgcccatgtcncatcacacaagtagtgatcccctatcaacatagaggcaggagcagtgatttgtatggaagttgcattggtgactgagctgagagagtctgtatttacaacaaaggaactttacagttggattcacagctcctgcctttggatatggaacccgt

SEQ ID NO: 1807 - DNA, 481 bp, Homo sapiens
  misc_feature 389, 396: n = A,T,C or G
cgctctcagctctcggcgcacggcccagcttccttcaaaatgtctactgttcacgaaatcctgtgcaagctcagcttggagggtgatcactctacacccccaagtgcatatgggtctgtcaaagcctatactaactttgatgctgagcgggatgctttgaacattgaaacagccatcaagaccaaaggtgtggatgaggtcaccattgtcaacattttgaccaaccgcagcaatgcacagagacaggatattgccttcgcctaccagagaaggaccaaaaaggaacttgcatcagcactgaagtcagccttatctggccacctggagacggtgattttgggcctattgaagacacctgctcagtatgacgcttctgagctaaaagcttncatgaangggctgggaaccgacgaggactctctcattgagatcatctgctccagaaccaaccaggagctgcaggaaattaacagagtctaca

SEQ ID NO: 1808 - DNA, 289 bp, Homo sapiens
  misc_feature 128, 129, 214, 220: n = A,T,C or G
ttggttctctcttctaagtttctgcccctctgcttccttactttttttcctttttgaattctatctttatctgtcttttgttcactttttaatgctatatatgggcaggggtgagagacattactgannaccttggtgagcaagcctggctttaaagattggagaagagcttctggcaccagaaccctgtcttcctccagttctcaacacggtngttgcntcttcagtcataccggaatctgaatcaaaaaagtattttaaatatccatgatttctccctgtattgagg

SEQ ID NO: 1809 - DNA, 345 bp, Homo sapiens
acactgatctgagatcgcaccactgcactccggcctgggcgacaaagtgagactgtctaaaaaataataataataaaaagcattttgaaattagtcgtggtcaatgtaattctactctttggaatccgtttagctaaatgaatgtagtgctcttgttgaatggaaacaggtgataggaaatgcctaccatttgactcaatatggataatcaagagttgctcaggatgcttggatctgggggtagattctcattcatcattgccctggcacatgtcaattactacataaaaggtcaaatgcaatgtcaaatccaaagcctcaggaggaaagtgagttcagttccca

SEQ ID NO: 1810 - DNA, 212 bp, Homo sapiens
actcccgattgaagccccattcgtataataattacatcacaagacgtcttgcactcatgagctgtccccacattaggcttaaaaacagatgcaattcccggacgtctaaaccaaaccactttcaccgctacacgaccgggggtatactacggtcaatgctctgaaatctgtggagcaaaccacagtttcatgcccatcgtcctagaattaat

SEQ ID NO: 1811 - DNA, 494 bp, Homo sapiens
aggacacagcatggacatgagggtccccgctcagctcctggggctcctgctactctggctccgaggtgccagatgtgacatccagatgacccagtcgccatcctccctgtctgcatctgttggagacggagtcaacatcacttgccgggcaagacagagcatttacacctatgtgaattggtatcagcagaaaccagggaaagcccctaacctcctgatctatgctgcatccattttgcgcagtggggtcccatcaaggttcagtggcagtggatctgggacagatttcactctcaccatcagtagtctgcaacctgaagattttgcaacttactactgtcaagagagtcacagttcgcctccgtggacgttcggccaagggaccaaggtggagatcaaacgaactgtggctgcaccatctgtcttcatcttcccgccatctgatgagcagttgaaatctggaactgcctctgttgtgtgcctgctgaataact

SEQ ID NO: 1812 - DNA, 386 bp, Homo sapiens
actcattttttatttttaataattgctacttgaatatacagcatgtttttaaaagtaataaggtttataggaagcagggtccacagccgtagctctttcaaatattagataaataatagctctttcagttcaattatttatgaacgatagtttttctgacctaagatgctcatctacagtattcatatagattctcatattcttttaagaatctttcacacagtgtaactgtcatgcattagatatatgaaagattctgtgttgaagggtaattcaagttcatatactgtttcctggaatggtgtcacaaaatggatctcacttggcatataaactgccaagtccttatacatataaaagaaatggcaaactgccagatattgagt

SEQ ID NO: 1813 - DNA, 278 bp, Homo sapiens
acagaagagagaaattcaaacaaaatattgctgttcttcagttttgtttgtggaatttgaaattactcaaatttaaaataaattactggactgtggaaataacatagaattgaagttttaattaaataccactcaaacgaaaagaacagtagtttttgtagttttatattggatactgaggcattagggaggcatgaaaggaagaggaatgaggattgagacatgtgaagacattgtgcattatatcaatgtgcattcctgtagttcattaacaaggt

SEQ ID NO: 1814 - DNA, 385 bp, Homo sapiens
  misc_feature 14, 251, 255, 256, 300, 320: n = A,T,C or G
acagcccaatacangatcatccaaaaacacgttgacacttccaagacactggcacggggtccacggagttttgcgcgtaaaattttaaaaacccttcctacggtgatgtttaaggccaggagcattcatttctcaaccttgtatcaatccaggatccatcggactaggtttcattaggcaagagagtagttcgttcctcctctgtgctgaggatgttttgagatttaggacctttttctccttgaatactncagnngataaaacaaggcccatggctaatccacttatcagagcccatangaccttgtatagctgctgcnccattcaaaaccaattttctcatacaggaaatccacccagcgttggtcccataaaagcaccaatt

SEQ ID NO: 1815 - DNA, 643 bp, Homo sapiens
  misc_feature 584: n = A,T,C or G
acagggaacagatgaaccgcctctggaggaacacgtgcagtcaacaaatgaaagtctacagctggtaaaccatgaagcaaattctgtggcagtggatgttattcctcatgttgacaacccaacctttgaagaagacgaaactcctaatcaagagactgctgttcgagaaattaaatcttaaaatctgtgtaaatagaaaacttgaaccattagtaataacagaactgccaatcagggcctagtttctattaataaattggataaatttaataaaataagagtgatactgaaagtgctcagatgactaatattatgctatagttaaatggcttaaaatatttaacctgttaacttttttccacaaactcattataatatttttcataggcaagtttcctctcagtagtgataacaacatttttagacattcaaaactgtcttcaagaagtcacgtttttcatttataacaattttcttataaaaacatgttgcttttaaaatgtggagtagctgtaatcactttattttatgatagtatcttaatgaaaaatactacttctttagcttggggctacatgtgtcanggtttttctccaggtgcttatattgatctggaattgtaatgtaaaaagcaatgcaaact

SEQ ID NO: 1816 - DNA, 518 bp, Homo sapiens
  misc_feature 473, 489: n = A,T,C or G
acccaaaactgaaagaagtggatgatgtgcttggtggagcagctgcctgggagaatgttgactctactgcagagtcgtgtcccaaatgcgaacatcctcgtgcttacttcatgcagcttcagacccgctctgcagatgagccgatgaccaccttctacaagtgctgcaatgctcagtgtggacaccgctggagggattagggccaggatggcccagctgccctagtgtgtgcttgccttgtccctcggggtagatgcttagctggcagtatgagttgtgtgtcctgagggtctttgctagtgtggtggaaagataaaccttttgaggtgaagagccagggggtcaggaaatatggcctatctgccaggcagggtggatgaagtcatgaatgtctgggagtttttctgtgtggggaggagacagagacccataaactaaatatgctctgtgtaaagtcctattcttttatgttncactttattggcagtngacattcccttactcccaatcaacactct

SEQ ID NO: 1817 - DNA, 382 bp, Homo sapiens
  misc_feature 320: n = A,T,C or G
accatgctgttttggttactgtagccttgtagtatagtatataaaattatttaaagcagtttaccattaaaaacatatatacaataaggctaatcaaaacgtttaaaagtgagaattagatgaaaaaaatctaggttagtttttttatacttaagcatagccgcagagcttcttaacagtcaaggcagaaataaaaatgtgtaattctactgcctgattcatatcacaagagaaagaatttttgaggtgataaattcagagatatttatctcatgtttctttaccctaagaatatagatctacataatgagtcatatcgntcaatgatatttttggagtatgcagaacattattaatgataattgcttatgtttatgtatgc

SEQ ID NO: 1818 - DNA, 144 bp, Homo sapiens
  misc_feature 16: n = A,T,C or G
caagaaaccagactgngatgactgggagagcgggctgaatgcaatggagtgtgcattacatttggaaaaaaatgtgaatcagtcactactggaactgcacaaactggccactgacaaaaatgacccccatttgtgtgacttcat

SEQ ID NO: 1819 - DNA, 162 bp, Homo sapiens
  misc_feature 154: n = A,T,C or G
aaattgcctgtggattattggcctctactaacttgcactgtcgtaaaaacaatttaagattcccccaattcatgtaaggcaatatcaccatgggcttttctccttcttctatacacacatgagtaataggaagaagatttctgtgatgaagacnctcgcagc

SEQ ID NO: 1820 - DNA, 201 bp, Homo sapiens
tagaggagctgatgaagctttctcccgaggaattactgctgcgatgggtgaactaccatctgaccaatgcaggatggcataccatcagcaacttcagccaagacattaaggactcgagagcctattttcatctgcttaatcagattgcccctaaaggtggggaagatggacctgccattgccattgacctttcaggaatta

SEQ ID NO: 1821 - DNA, 277 bp, Homo sapiens
acctctcaacattaccaaaatcatttctttagagggaaggaataatcattcaaatgaactttaaaaaagcaaatttcatgcactgattaaaataggattattttaaatacaaaaggcattttatatgaattataaactgaagagcttaaagatagttacaaaatacaaaagttcaacctcttacaataagctaaacgcaatgtcatttttaaaaagaaggacttagggtgtcagttttcacatatgacaatgttgcatttatgatgcagtttcaagt

SEQ ID NO: 1822 - DNA, 443 bp, Homo sapiens
actctaatttcactaactgccaaaaggttttccagaataatctcagttgcttcattcctttaaagatgaagcccgaagaacgcatggcgattactttagaggaacaattagcagcagaggcagggctgtgctgatcccatctggcatcgctgggagctaacattaaagacatggcactttgggtccgggtccaggtcctggttcagagcagctgccacaccgtggctactagaggatccttttccggctttggaaactgaggctgactgcaccatttacagaaatttcatcatgaagatccttacacttaacaccttaaggtgatgagttttcacatgactgttttcaaggccacagccaccacctttaatcatcatcactaaaggcctgagactgctcgccgtgctcaacaccgactggagtggccatgtcttccagccacg

SEQ ID NO: 1823 - DNA, 506 bp, Homo sapiens
acacagatgggaagccctaagtcatcaccagggcaactgtgggaggatccaatgccccacagaggaaagaaacagtaacctcatgtgaggaagagaagttcgtccccccgccaccctagttcctaaaaaacacctagcactttccttccggttccctcagcttttaaccaactaattatcaaacggaagaaaacataaagcgcaagacacaggagggagagagggggagaatgaaaacacaggtatttttgtgccaacatcctgcacacacaaacctggagttctccagaaattacgacaggttgggtgtggggtattagggaaggaaatagaagagttcccgaggcctgaaaaaagaggtaaacacatcacagaactagatgagagtttcattagactctaactaaaaacagagaggtgtgattactatttccagccagtttcccccatcacgataagtcatgtaacaaaccaaggcaatgtcggtcttgagccagactcacaga

SEQ ID NO: 1824 - DNA, 234 bp, Homo sapiens
gtcatgacgccagtcagatcacactagccttgggcacagctgccatgctgtccaaaggagccctgaaccctgctgacatcaccgtcctgttcaagatgttcacaagcatggaccctcctccggttgaacttatccgcgttccagccttcctggacctgttcatgcagtcactctttaaaccaggggctcggatcaaccaggaccacaagcacaaatacatccacatcttggcgt

SEQ ID NO: 1825 - DNA, 321 bp, Homo sapiens
acacaaagctacccaggagggttgctgaagcacatgtgcctaatttcatttttgatgagttcagaacagtgctgtaactgtttttcctacttcttcaatggaaggattgtccttagatcttcccaccatcacaaatgaatttgaagatgaaaagaaactcagttgctcatacaactgcattttttctgtctattatgggaaacatcagacgttctgagtaagatatatctcatggcattagttaatataactgatattgtttaaatcatggtattacatgcaatttatatcagataaaagcagaacacatttttgtacctg

SEQ ID NO: 1826 - DNA, 395 bp, Homo sapiens
  misc_feature 304, 319: n = A,T,C or G
actctcaaccatgatagataatgccttaacatggattttaacgtttgcaggatttgctaaattcataagatagttattacctttctttgaaatttgtaatgttttatattcttgtttcatagccatttgtcagtccacagtggtcattatggttttactttttgatagttcttacaccttgttggagaaactacaaaagaaagttgtcctcgtccttccccttagctaacatcaaaattaaaaagttgaatattaatattagctaacattaaaatggaaggtaatttcaggttttagtgttagnctaacattaacagtnctaataatttagctttgtaaattccaaggctaaaaccctttcatgggcttcacagtatttagtcctaattaaatac

SEQ ID NO: 1827 - DNA, 471 bp, Homo sapiens
tttttttttaaaaattaagactggggtgatttattaatcttgttaagaactctgatacaaagcacagtaaaaggccacaaaccagtaaataaacaacgtggcttttggctattttacaactgctgctacagcactatcagcaaaacactctatcactttgaacgaaggcatccaaatggcaaataaaagctttactcacttatctgattaaaatgtttaataaagctttaagtatttgctggtttaaatattaccaatctaaaaaatatatttaaaaaaaatttcagttaacacgagatttatagagaaagttactaggtcttgaaggcaaggcagttggttcctatgccatagaattttttttgaatttatgaattagtaaagtagcagattgtattataggcctcaagtcacttaaatttatataggttattagcagtatctttaaatatacaatataaacaaaactgt

SEQ ID NO: 1828 - DNA, 422 bp, Homo sapiens
  misc_feature 12, 13: n = A,T,C or G
accattctgganngctgtccactgtatagaacatttatgaatagaaggtaaggacactctgatgattcccacgaactaggaggattggtggtaggtccttagatagagcttctaaccatgccatgtagagagcactagacacagcaccttttcgtgcaactgggagactcatgacaataatattagctgtgcttgaatgttcctttaataactcatttaacctgatctgccggtatgtcttggtcttataaagttcaagctcattatctgttattcgccatggttcatcttctttcattttatctgcaatatcttgctctttatcatcttcaggaaatcattgagccatacagacttcatgatttcctcaaaagctataatattttctttctttggtttggtattgatatctcctagaacca

SEQ ID NO: 1829 - DNA, 317 bp, Homo sapiens
actcgcttttgtgggacttcttttttcactgttggtgatgacaaaactgtgaagcagtggaaaatggatgggccaggctatggagacgaggaagagccattacatacaatattaggaaagacagtgtatactgggattgatcatcactggaaagaagctgtttttgccacatgtggacagcaagtagacatttgggatgaacaaagaactaatcctatatgttcaatgacctggggatttgacagtataagtagtgttaaatttaacccaattgagacatttctcttgggaagttgtgcatctgacaggaatatagt

SEQ ID NO: 1830 - DNA, 77 bp, Homo sapiens
  misc_feature 8: n = A,T,C or G
acctgcancaacccagggcagtctccacagctcttgatctatttgggttctaatcgggccgtccggggtccctgaca

SEQ ID NO: 1831 - DNA, 446 bp, Homo sapiens
acttgagaccagaaactgcacaggggattttcttgaatttcaaacgacttttggagttcaaccaaggaaagttgccttttgctgctgcccagattggaaattcttttagaaatgagatctcccctcgatctggactgatcagagtcagagaattcacaatggcagaaattgagcactttgtagatcccagtgagaaagaccaccccaagttccagaatgtggcagaccttcacctttatttgtattcagcaaaagcccaggtcagcggacagtccgctcggaaaatgcgcctgggagatgctgttgaacagggtgtgattaataacacagtattaggctatttcattggccgcatctacctctacctcacgaaggttggaatatctccagataaactccgcttccgggcagcacatggagaatgaggatggcccattatgcctgtg

SEQ ID NO: 1832 - DNA, 266 bp, Homo sapiens
actatctgtgaagttacacttttttttttttttaaaggtagagatgtgtgtgtgtgtaggtattaaagatgtgttgttggtttccaaaaaggaacactggaaaataaattttgaatgtttatgttctcagaatcaggttgacagtcccttgctgacatggctttgctttgtgtaaatacagtggatctcaatcttcggggtgtgatgaatagcgaatcatctcaaatccttgagcactcagtctagtgaagatgttgtcattatgt

SEQ ID NO: 1833 - DNA, 275 bp, Homo sapiens
  misc_feature 15: n = A,T,C or G
acaaaagaaccacanatgcgtctctgtaggactgaaaaggtcaggacaaataatgattcttgttctaaatgcagatcctagttattttggaatgaaatgctgttttctagaaagcaacatgaaagtagcagtaagaaagatgactaccatcatttcaaaacaggataagcctaaatataatttaccatttatatgtcaacaaattaaggaaaactgtataaagttcctagtggtttcatataggccaaggagactgtatctgtcccacccacagt

SEQ ID NO: 1834 - DNA, 202 bp, Homo sapiens
acagtatgatgcgcaaggaatggcctttagcaaaagcgaaggtaaaagaaagactgcaaaagcagaagcaattgtttataaacatggaagtggaagaataaaagtaaatggaattgattaccagctttacttcccgatcacacaggacagagaacagctgatgttccctttccactttgttgaccggctgggaaagcacgac

SEQ ID NO: 1835 - DNA, 176 bp, Homo sapiens
acttctacctctcacttctaattaaacatggaagaaaacagactggctaatttggtcacactttgtccaaatacagtgttgacttaatggagcccttaaatatccaaaataataagtgaatgctatttataagacaataaaaagttttaaaatcttccaaatgtgctgttaacagt

SEQ ID NO: 1836 - DNA, 330 bp, Homo sapiens
acctcgcaaaccaagccaagaaccagtcagatgaggcaaaagaggctaaggggagtgggtatgagaaattagggcccagtcgagacccagatccactgaacatctgtgtctttattttgctgcttgtatttattgtagtcaaatgctttacatcagaatgatgaaaataggcttgccactttctcttattttaattccatggtagtcaatgaactggctgccactttaatataactgaaaattcattttgagaccaagcaggatcaagtttgtagaataaacactggtttcctagctatcctctgaaaacagtatgaaacatgaccaagt

SEQ ID NO: 1837 - DNA, 170 bp, Homo sapiens
  misc_feature 11: n = A,T,C or G
acaaaaccaantgcaaatatcaaactattacacaacaaaggaactcaacattaaggggacactgcctaatgataacaaaaacttaagttataattagagtttcagagatagatttagattggggtttctgtatttttcttacatcagctggaaacttatgcaccaattat

SEQ ID NO: 1838 - DNA, 444 bp, Homo sapiens
accgcattacattatgcctgtgaaatgaaaaaccagtctcttatccctctgctcttggaagcccgtgcagaccccacaataaagaataagcatggtgagagctcactggatattgcacggagattaaaattttcccagattgaattaatgctaaggaaagcattgtaatccttgtgaccacaccgatggagatacagaaaaagttaacgactggattctatcttcattttagacttttggtctgtgggccatttaacctggatgccaccattttatggggataatgatgcttaccatggttaatgttttggaagagctttttatttatagcattgtttactcagtcaagttcaccatggccgtaatccttctaagggaaacactaaagttgttgtagtctccacttcagtcagaaactgatgtttcagctaggcacagtggtac

SEQ ID NO: 1839 - DNA, 310 bp, Homo sapiens
acaagctttttggagaaaagaaaaagaacagcagctattacatgataaacagatggaagaagaaaagcagcaaacagaaagggttacaaaagagatgaatgaatttatccataaagagcaaaatagtttatcactactagaagcaagagaagcagacggtgatgtggttaatgaaaagaagagaactccaaatgaaaccacatcagttttagaaccaaaaaaagagcataaagaaaaagaaaaacaaggaaggagtaggtcgggaagttctagtagtggtagttccagtagcaatagcagaactagtagt

SEQ ID NO: 1840 - DNA, 381 bp, Homo sapiens
acgacgaaattgaggccgaggtgaatctatgttttgactaatttgtttacaagctagcagaccagatatttgcctattataaggttatggcaggaagtttgcttcttgataaacggttacgatcagaatgcaagaatcagggagccacgatccacctcccgccgtctaaccgctacgagacgctgctgaagcagaggcatgtgcagctcctcggcagatcaatagacctcaatcgtctgatcacccagcgcgtctcagcagccatgtataagtccctagaactggcgattggacgatttgaaagtgaagatttgacctccatagttgagctggatggcctgttggaaatcaaccgcatgacccacaagctgctgagccggt

SEQ ID NO: 1841 - DNA, 138 bp, Homo sapiens
  misc_feature 24, 25: n = A,T,C or G
acatgacaaggtgcggctccctanncccctcccctcttcaaggggtctacatggcaactgtgaggaggggagattcagtgtggtgggggactgagtgtggcagggactccccagcagtgagggtctctctcttcctct

SEQ ID NO: 1842 - DNA, 142 bp, Homo sapiens
  misc_feature 64, 65, 80, 110: n = A,T,C or G
acaggcactttctgagaaacctttgtcctcacttgaggcattttgttgtcgggtttttgagttnntttttgtgggtattngcctcattccacccctgagctttcaggtanacagacgtgattcaaaactctgttctaaggtg

SEQ ID NO: 1843 - DNA, 338 bp, Homo sapiens
  misc_feature 8, 9, 23, 24: n = A,T,C or G
accctttnngctcttggccctcnngtcctgtcctggaccattggcaatataacagagacagctttctgcttctcaagaaaggattttttttacatcatcagaaaacatcaagtgaatcaagaaagaatagagctctgaggaccactgaagattcatgaggatctttgtgaatgctctgcagatgaaaaaggtattggggatcactttgaaatatggagttagggagggagactatgaagaaaaaagaaaaaaacttggagagaaggaacaccttgaagatgaagacattgcatctagaatgaagggtgaaaaaaaagctgatacatttcaatcaatgt

SEQ ID NO: 1844 - DNA, 398 bp, Homo sapiens
acactgttaagaagttgagcttttatcttagaggcagcagaaggtttggagccaaggaatgaaatgatgaggcgtccttcaggtaatgaacttcagctgcagtgtgaaaggggcaggaagactggcagctgtcaaaactggaacagtccagtgagtatgtgcaggcccgggcttgggcagtgacgagggcagggagcacacatcaatttctgcggtagaaccttctagaggaagaccagacagagggtcaacagagttgaaaggagaaaataattgaggatgaggtccaagtttttagtttcagagactaggcatatggttaatatttaggtagaaaattcaggaaaaggagcttgtggggcaggaagggaaggaacggcagcttggggcactctgaa

SEQ ID NO: 1845 - DNA, 135 bp, Homo sapiens
  misc_feature 46, 52, 53: n = A,T,C or G
cttcaccctaggcctggacccaggcccagtttccaaagcaagcagnacacanngcatgttcacataagcatgggggctggggggacactggggcttactgatctttttctaggggcctccagcccctggcaccac

SEQ ID NO: 1846 - DNA, 560 bp, Homo sapiens
actggtccaggagttatccaggatagattttcacccaccatgggacgtcatcgttcaaatcaactcttcaatggccatgggggacacatcatgcctcccacacaatcgcagtttggagagatgggaggcaagtttatgaaaagccagattagcctgaggcctgctcagtcgttcctaatgaataaaaatcaagtgccaaagcttcagccccagataactatgattcctcctagtgcacaaccaccacgcactcaaacaccacctctgggacagacacctcagcttggtctcaaaactaatccaccacttatccaggaaaagcctgccaagaccagcaaaaagccaccaccgtcaaaggaagaactccttaaactaactgaaactgttgtgactgaatatctaaatagtggaaatgcaaatgaggctgtcaatggtgtaagagaaatgagggctcctaaacactttcttcctgagatgttaagcaaagtaatcatcctgtcactagatagaagcgatgaagataaagaaaaagcaagttctttgatcagtttactcaaaca

SEQ ID NO: 1847 - DNA, 485 bp, Homo sapiens
aaaagattgatcgccgttctggtaaaaagctggaagatggccctaaattcttgaagtctggtgatgctgccattgttgatatggttcctggcaagcccatgtgtgttgagagcttctcagactatccacctttgggtcgctttgctgttcgtgatatgagacagacagttgcggtgggtgtcatcaaagcagtggacaagaaggctgctggagctggcaaggtcaccaagtctgcccagaaagctcagaaggctaaatgaatattatccctaatacctgccaccccactcttaatcagtggtggaagaacggtctcagaactgtttgtttcaattggccatttaagtttagtagtaaaagactggttaatgataacaatgcatcgtaaaaccttcagaaggaaaggagaatgttttgtggaccactttggttttcttttttgcgtgtggcagttttaagttattagtttttaaaatcagtacctg

SEQ ID NO: 1848 - DNA, 420 bp, Homo sapiens
actggcacgctctatagccaaggaaggcttcgagaagattagcaaaggtgctaatccagtggaaatcaggagaggtgtgatgttagctgttgatgctgtaattgctgaacttaaaaagcagtctaaacctgtgaccacccctgaagaaattgcacaggttgctacgatttctgcaaacggagacaaagaaattggcaatatcatctctgatgcaatgaaaaaagttggaagaaagggtgtcatcacagtaaaggatggaaaaacactgaatgatgaattagaaattattgaaggcatgaagtttgatcgaggctatatttctccatactttattaatacatcaaaaggtcagaaatgtgaattccaggatgcctatgttctgttgagtgaaaagaaaatttctagtatccagtccattgt

SEQ ID NO: 1849 - DNA, 200 bp, Homo sapiens
actattgacccagcgatgggggcttcgacatgggctttagggagtcataagtggagtccgtaaagaggtatctttactataaaagctattgtgtaagctagtcatattaagttgttggctcaggagtttgatagttcttgggcagtgagagtgagtagtagaatgtttagtgagcctagggtgttgtgagtgtaaattag

SEQ ID NO: 1850 - DNA, 562 bp, Homo sapiens
  misc_feature 125, 126, 300, 326, 334, 340, 355, 363, 368, 384, 390, 399,401, 413, 421, 485: n = A,T,C or G
acttcagtaagagatgggggcaaaagagttggtagtggtgcacaaaaaacaagaacaggaagactcaaaaagccttttgtaaaggtggaagatatgagccaactttataggccattttatcttcnnctgaccaatatgccttttataaattattctattcagaagccctgcagtccatttgatgtagacaagccatctagtatgcaaaagcaaactcaggttaaactaagaatccaaacagatggcgataagtatggtggaacctcaattcaactccagttgaaagagaagaagaaaaanggatattgtgaatgttgcttgcccanatatgaanatctanaaactcaccttctangtgagcancacanaaactttgcacagagnaaccantatcaagtngntgatgatattgnatctaagntagtttttgactttgtggaatatgaaaaggacacacctaaaaagaaaagaataaaatacagtgntggatccctttctcctgtttctgcaagtgtcctgaaaaagactgaacaaaaaggaaaaagtggaattgcaacatatt

SEQ ID NO: 1851 - DNA, 207 bp, Homo sapiens
gaaagttcccttccctgcccacacacaacgaaaacatggtggccaaagtggatgaggtgaagtccacaatcaagttccaaatgaagaaggtgttatgtctggctgtagctgttggtcacgtgaagatgacagacgatgagcttgtgtataacattcacctggctgtcaacttcttggtgtcattgctcaagaaaaactggcagaatg

SEQ ID NO: 1852 - DNA, 260 bp, Homo sapiens
actttttggtgggagtggggtgggacatggaaggggtagggtcagatggagacagcccagaaggaaagccagctctatccacccctacagcttccccggccaaccaggttcaaagcccatcagttatatctcactgtgccgctgtcaatgcatgttgtggctgctggtaaagagttggtttggcctccacagagagaggatgggaaactagggtagaagctacaagggctaagaacttgatgctttttctccagtacctg

SEQ ID NO: 1853 - DNA, 176 bp, Homo sapiens
  misc_feature 14, 15, 16: n = A,T,C or G
actccttacactannncctcatcacccaactaaaaatattaaacacaaactaccacctacctccctcaccaaagcccataaaaataaaaaattataacaaaccctgagaaccaaaatgaacgaaaatctgttcgcttcattcattgcccccacaatcctaggcctacccgccgcag

SEQ ID NO: 1854 - DNA, 371 bp, Homo sapiens
  misc_feature 359: n = A,T,C or G
ccagaaccagggtgacatcaagctctgtgagggtttcaatgaggtgctgaaacagtgccgacttgcaaacggattggcctaatgaagaagttcaacctggagagatggaaaatcagctctcataactaagttaatttagtataaaaatagaattgatagtgagggtataaagtgtaaccatcagttaaacctctcctgtcattcctggcttccttgcttcagaattgaaatggaagtgggggtgtccctactctgtagaatctgggactgggcaaatgtttgtgtggcctccttaaactagctgttatgttatgattttattctttgtgagttaattagaataaagtcattttcttccnaaaaaaaaaaaa

SEQ ID NO: 1855 - DNA, 302 bp, Homo sapiens
  misc_feature 15, 16, 153, 251: n = A,T,C or G
ttttcatttcaggannggacgcttctcttgtgagccagctggaggtcttacctctttgactgaaccacccaagggacctggatttggtgtgtcagggccagggaggcatggccccacttgtatccagaagttcccaggggtgattgtgatggnggttgggactggaggttgtataaggtgttcttggaaggaaggggcaggagttggaattagttggtccctactgtcccccatgaggttgtgaacccctncccccaacttttcatgtttcttaaaggccattttggttttttaaaatctgt

SEQ ID NO: 1856 - DNA, 234 bp, Homo sapiens
acagagagggcaggaagtttccatccagtctggtttaggtgctcttcttttcttcacccagtaaattcacggtagctttcttcgcttctttagtgatggcatctgcagtctctttggccttgtctttaaggtccttgaccacactgtccatctgggactcgtgcttcaggaagaaaggacggatgatgcgcttgtagagcagttcagccccattagaagggctcggggccatgc

SEQ ID NO: 1857 - DNA, 570 bp, Homo sapiens
ccaaattccagtgtgcagaccacaacctcaaaacaaaaaaggttggtcatgcagcattaaactttgacaaggccactgacatcgtgacaggtctgaaacagaaaacctcctttgggagaccaatgtgggacaatgagttttctacaatagctacctcccaccccaagtctgtagtgggagttttcttatgtggccctcggactttggcaaagagcctgcgcaaatgctgtcaccgatattccagtctggatcctagaaaggttcaattctacttcaacaaagaaaatttttgagttataggaataaggacggtaatctgcattttgtctctttgtatcttcagtaatttacttggtctcgtcaggtttgagcagtcactttaggataagaatgtgcctctcaagccttgactccctggtattctttttttgattgcattcaacttcgttacttgagcttcagcaacttaagaacttctgaagttcttaaagttctgaagttcttaaagcccatggatcctttctcagaaaaataactgtaaatctttctggacagccatgactgtagcaa

SEQ ID NO: 1858 - DNA, 266 bp, Homo sapiens
actggaaaaacgaccttcgtgaaacgtcatttgactggtgaatttgagaagaagtatgcagccaccttgggtgttgaggttcatcccctagtgttccacaccaacagaggacctattaagttcaatgtatgggacacagccggccaggagaaattcggtggactgagagatggctattatatccaagcccagtgtgccatcataatgtttgatgtaacatcgagagttacttacaagaatgtgcctaactggcatagagatctggt

SEQ ID NO: 1859 - DNA, 495 bp, Homo sapiens
  misc_feature 15, 481, 491: n = A,T,C or G
acatacgtctgccangggtaacctggccactgtccctgtccttctacagaacctgagggcaaagatggtggctgtgtctctccccggtaatgtcactgtttttattccttccatctagcagctggcctaatcactctgagtcacaggtgtgggatggagagtggggagaggcacttaatctgtaacccccaaggaggaaataactaagagattcttctaggggtagctggtggttgtgccttttgttggctgttccctttgccttaaacctgaagatgtctcctcaagcctgtgggcagcatgcccagattcccagaccttaagacactgtgagagttgtctctgttggtccactgtgtttagttgcaaggatttttccatgtgtggtggtgttttttgttactgttttaaagggtgcccatttgtgatcagcattgtgacttggagataataaaatttagactataaaaaaaaacctcgntccccactanggta

SEQ ID NO: 1860 - DNA, 489 bp, Homo sapiens
  misc_feature 469: n = A,T,C or G
acagattgggcggaatgtggagaaggttggccacagtccagagccaggagcccatggaacaacttggaaggtgactcaggtgaggctgtcaatgagggaatcccgcatgctggtggcaatggtgctaggctgggcttcattcagcttgaagacactctccaccactgacagctctgtgctggttgtgtccaggccacagaaggcacaccagtcattcaccaccatcccagcagcaatcacctcactgcctcggttcacagtccccgccacaagggggacttgaagaagagaggacagctcatcctggtcttcaattgaagtcttgggatgcaccagccctccctgattgctgaagacacagtagcttcctactagcacctggtcggccactgtctgtctgaagacttccaccttgagcacatctgccagaatttcttctgtctccctgtccaagtctgggtggaccaangccacgtagtcattgcaggt

SEQ ID NO: 1861 - DNA, 443 bp, Homo sapiens
accaccttaattcctcagaatgcaattgtgtatgataccaagctacaacttgataagaaattgtgattttcttcttttattttcattctccaattttaaaaacatctattgcacatctaccatgtaggaggaatgtgctcacactggagaacagaaaaaagttttcaatcttcattacctgcccatgaggggcttagtctagctgggaaggaaagaaagaaccaatcaaaaggagtttagtgccacaggagcacagcaaggagagaccaaactgcccaggattcaaggaggatcatccagagatctgtcagggggtttcctctgggtccccttcgtttgtctagaaggccacacaaataaagaaattagatttttaaatacaacacagatcgaccttaggtgtgcccaaaacactactgtatataaacaagaactggtacctc

SEQ ID NO: 1862 - DNA, 106 bp, Homo sapiens
acaaggaggggaaggaagctgaacaggggtggctcgtgagctaaggaccaaaggtcgacctgtctggatgtttggagcaggactactggagagggcattaggcggt

SEQ ID NO: 1863 - DNA, 454 bp, Homo sapiens
acaaaagggaagggcgattcacactttacaaggtgagaggggctctgattgtaaggaaagctcgggcaaggctagacttttgcacgtccttttgactgtcacaaaatcaaaacattacttttttaggattgaaaaaacactagtgagaactcaatcttgaataacatttagaaagaatctcgctatacttgagactagatgacaaataaaaccaagctatttttttctttttaaacattaactaggctgtataaagaacatttattccttcaaaagaaaaaaatttacttctggttgaaattacaatttacaatatacaacactatatgctacgaccataaaaggtgagaatatacactgaatgcacagggctggctaattctcttttcttaccaaaaaacgtgtttatgttgattcaaacttctccacatttacattacaggtatacaaatgt

SEQ ID NO: 1864 - DNA, 454 bp, Homo sapiens
acccatgcaggactcactacattgtataataactatgatctatagtgataaaaatatagaagtatctttgattttaatcctaaaagcagggggaaaaagtcaccttatcttaatgttaacaaaatcaagagctacccctaatatatcgatcaaaccacttcttatggctttgcttatagttgctcatggtcctttcaaaatgatgtggtagctaccttcttttctgacaaaggattattttcaacagagcaattatttctgagcccaaaataaaccacattaaataagaagaaaatcttcagtgtagaaagaaaaaggctcattgccgtgaaatagcagcaggcatcgagctctgtgagcttttcacacatcctcaatcaacccagctcaaggcgttactgagttcatctagtaagagcactgagcggtctctagtgctggaggggaattactc

SEQ ID NO: 1865 - DNA, 389 bp, Homo sapiens
acacaatgtgtagctcatatgaaaacctcatgacaagtcattgagttctgtaaactgccatacaacttacatgtgtaatattaattgcacaaagtatatcaagacatattgaagaaacacaaaattaagtgctattttaacggttcatctttcagtatgtgaatacgtatacaaatttaactgcacagttttgttgaaaataagtttcaacaataagacttcagttgttaaaattaacccaaaatataactttaattaaattacatcactacaatattaatctcttatcttgtttacatttttggtgttttgggacttttgttaaaaaaaaatccaagttctagaattgcaaaaacttcattgttgccactgagagagcaacatatagt

SEQ ID NO: 1866 - DNA, 303 bp, Homo sapiens
acagagagaggaagaagctattcagttggatggattaaatgcatcacaaataagagaacttagagagaagtcggaaaagtttgccttccaagccgaagttaacagaatgatgaaacttatcatcaattcattgtataaaaataagagattttcctgagagaactgatttcaaatgcttctgatgctttagataagataaggctaatatcactgactgatgaaaatgctctttctggaaatgaggaactaacagtcaaaattaagtgtgataaggagaagaacctgctgcatgtcacagacacc

SEQ ID NO: 1867 - DNA, 477 bp, Homo sapiens
acttggcccgggtcacgcgtgggtcctctccgggctcgggagtagcatcctcaggagtagtgtagcgagcaaattctggaaagtagtcctcaatcttcgatttcccagcaaggactttctcagcgagcagatcttgcttgttgaggaacaggatcacagagatggtgcgcagccatctgttgttccagatgctcttgaagaggttcagagcctcctgcaggcggttggtctggttgtcctcccggatgaccatgttgcagctgctgctggccaccacgaagatgatggcagtcacatcgttgaagcactggatccacttgcggcgttcatcgcgctggccacccacgtcaaacatgtggaagttgactttgtccacctggaacttggtctcaaagattccagaagtcaggacacggcagcgaagcaggtcctgatcgctcggcacatagtcagcctgcttgatcacgtcgatcttgt

SEQ ID NO: 1868 - DNA, 484 bp, Homo sapiens
actcccagtagcaccaccacctgagccaagatcactgacagcagaagaagtgaaacgactagaagaacaagaagaagatacatttagagaactgaggattttcttaagaaatgttacacataggcttgctattgacaagcgattccgagtgtttactaagcctgttgaccctgatgaggttcctgattatgtcactgtaataaagcaaccaatggacctttcatctgtaatcagtaaaattgatctacacaagtatctgactgtgaaagactatttgagagatattgatctaatctgtagtaatgccttagaatacaatccagatagagatcctggagatcgtcttattaggcatagagcctgtgctttaagagatactgcctatgccataattaaagaagaacttgatgaagactttgagcagctctgtgaagaaattcaggaatctagaaagaaaagaggttgtagctcctccaaatatgcc

SEQ ID NO: 1869 - DNA, 461 bp, Homo sapiens
ggaatggaatcacccggaatggaatggaatagaatggaatggaatggaatggaatggaatcaacgcgagtgcaggggaatgtaatggaacggaatgcaatggaatggaatcatccgtaatggaatggaaaggaatggaatggaatggaatggaatggaatcgaatggaatggaatggaattaacccgaatagaatggaatggaatgggatggaacggaacggaacggaacggaacggaatggaatggaatggaatggaatggaacggaaaggaatggaatggaatggaatggaatggaatgcaatggaatggaatcaacgcgagtgcaggggaatggaatggaatggaatgcaatggaatggaatcttccggaatggaatggaatggagtggaatggaatggaatggaatcaacgcgagtgcaggggaatggaatggaatggaatgcaatggaatggaatc

SEQ ID NO: 1870 - DNA, 222 bp, Homo sapiens
acagctacagcttcatcaaccttagaacggagtgactctggagactcgagcatatgaagaagttctgaattatcaatctccaacaacatgccagtgattttaccagcaagagtagggtgcatggcttgaataagaggaaacagccgttcacccaacatttgcttttgctcttgaggaggggcagatgccaacatggaagcagtcaaaggttcctgaccttgt

SEQ ID NO: 1871 - DNA, 114 bp, Homo sapiens
tgcacaaccactacacgcagaagagcctctccctgtctccgggtaaatgagtgcgacggccggcaagcccccgctccccgggctctcgcggtcgcacgaggatgcttggcacgt

SEQ ID NO: 1872 - DNA, 450 bp, Homo sapiens
  misc_feature 366: n = A,T,C or G
accagccactacccctatgcagaggaagtgatgcagatgtgtgaccgctatgggattgtggtcatcgatgagtgtcccggcgtgggcctggcgctgccgcagctcttcaacaacgtttctctgcatcaccacatgcaggtgatggaagaagtggtgcgtagggacaagaaccaccccgcggtcgtgatgtggtctgtggccaacgagcctgcgtcccacctagaatctgctggctactacttgaagctccgtatgtggatgtgatctgtttgaacagctactactcttggtatcacgactacgggcacctggagttgattcagctgcagctggccacccagtttgagaactggtataagaagtatnagaagcccattattcagagcgagtatggagcagaaacgattgcagggtttcaccaggatccacctctgatgttcactgaagagt

SEQ ID NO: 1873 - DNA, 498 bp, Homo sapiens
ctgccaggcccagcagccaccacagcgcctgcttcctcggccctgaaatcatgcccctaggtctcctgtggctgggcctagccctgttgggggctctgcatgcccaggcccaggactccacctcagacctgatcccagccccacctctgagcaaggtccctctgcagcagaacttccaggacaaccaattccaggggaagtggtatgtggtaggcctggcagggaatgcaattctcagagaagacaaagacccgcaaaagatgtatgccaccatctatgagctgaaagaagacaagagctacaatgtcacctccgtcctgtttaggaaaaagaagtgtgactactggatcaggacttttgttccaggttgccagcccggcgagttcacgctgggcaacattaagagttaccctggattaacgagttacctcgtccgagtggtgagcaccaactacaaccagcatgctatggtgttcttcaagaaagtttctcaaaaca

SEQ ID NO: 1874 - DNA, 145 bp, Homo sapiens
accaggctcctttctgtgtattttactctcgtggttgcattagatcctcacgataagagaaggatactgttactgttctcattctacagaggaggaaactaagacacagagcttttctttgagatctgaaagagttaagatttgt

SEQ ID NO: 1875 - DNA, 217 bp, Homo sapiens
accccaccctctatgaagacagaatcactctctgccattcattctgcctgatgctaacaacacgcagctgatttagggagtgtcccagcctagctggatcaagggaaattccaggagccctggggcaggccctggcccccagtgccaagcctcagagtaagcagacattgggaaagttgccaaccacttggtagaccactaggttctctgttttccc

SEQ ID NO: 1876 - DNA, 191 bp, Homo sapiens
  misc_feature 16, 117, 118, 143: n = A,T,C or G
tgaatttgccccttcngccaggtggatgtttaccgtgtgttatataacttcctggctccttcactgaacatgcctagtccaacattttttcccagtgagtcacatcctgggatccanngtataaatccaatatcatgtcttgngcataattcttccaaaggatcttattttgtgaactatatcagtagtgt

SEQ ID NO: 1877 - DNA, 608 bp, Homo sapiens
  misc_feature 522, 526, 540, 541, 586, 593: n = A,T,C or G
accaggtattccataaaactctgtagaggtcatttacatttcgtaaattctgtaattacaccttactgtatcatgccctagtagtttcacaaacttagatattcacaaaaatgttttggaatatattccttgggaatgtgaagggtctcctatattacattaaacaaaaaaccatgcagttacttagagctcatagagctttctcaaaatcaactactgatcataacagcccaattaaaaactcaaacactttatattacagatatagagtttataatccagcaatgccaatataggtaatctgatagcccctatttgcaaagtgattaacaattatacaataacttctatctgctttggctcagatgtttaaatacttaaacagtttggaaagacttttttctgtgtgtatttcgttttgtttttttgtctgtgtgggcatgagcataggggaggttatactgaaaaggagaatgaagaggtcaggaattaaagagccactaaaatttgacttaacatttntccnataaaatacatgtnngagaatatggcttaaagacaaagagggggagagcctcttaattgntcatacnattttacttcaccct

SEQ ID NO: 1878 - DNA, 227 bp, Homo sapiens
actcattttatgtatgttacccttcagtaagttctccccattttagttttctaggactgaaaggattcttttctacattatacatgtgtgttgtcatatttggcttttgctatatactttaacttcattgttaaatttttgtattgtatagtttctttggtgtatcttaaaacctatttttgaaaaacaaacttggcttgataatcatttgggcagcttgggtaagt

SEQ ID NO: 1879 - DNA, 399 bp, Homo sapiens
acattctgcacttgacatcacagagcgaactgagattagcagtcctatgttctacaattacttaatgcttagataacatttgtgcaacttgtggtagagctagatttctgtctttctatatgcacatgaggtccatagcctatataataaaactggcaaataatgcatattacatgtaaaattacaaatgcataattgacaatgtaataagcaagtagacaaatgccatgatacagaagagaattattaaataaagcactgacattgtttgatacagtgaaaaaacactgcaattccacttttaaaatttgaagctatttacgtttatctactgatcaatatgatcagctgaatttaatggaaaaaaaatccaagaccagcagttcctcacatttgagt

SEQ ID NO: 1880 - DNA, 52 bp, Homo sapiens
  misc_feature 18, 19, 20: n = A,T,C or G
attaaacgaattgaaccnnnccaaccacaagacgataaagggaaacagggcg

SEQ ID NO: 1881 - DNA, 226 bp, Homo sapiens
acgagctgttcccaaccctgtaatcaacccctaccagccagcacctccttcaggttacttcatggcagctatcccacagactcagaaccgtgctgcatactatcctcctagccaaattgctcaactaagaccaagtcctcgctggactgctcagggtgccagacctcatccattccaaaatatgcccggtgctatccgcccagctgctcctagaccaccatttagt

SEQ ID NO: 1882 - DNA, 144 bp, Homo sapiens
  misc_feature 9, 10: n = A,T,C or G
acatgttgnngctgccgctccgggagtcatagcgcagccagatcccgaagttcttcacccgcaggggggacttctcaaacacctgcccacagtagacaatctcccctgaagacttcttcatcttctttaactgagatacaaagt

SEQ ID NO: 1883 - DNA, 170 bp, Homo sapiens
  misc_feature 155, 156: n = A,T,C or G
acacacatacaggcctaactgagaccgctcagaatttagaaatgtaactagtggcatacagaagagaaattgtgtctatgacaaagaaataaaaaattcttggtaattttaagcatagcaaactaggttctttaattaaaaagtttttttttgtnnttttttttggtttg

SEQ ID NO: 1884 - DNA, 353 bp, Homo sapiens
  misc_feature 290, 313, 330, 335: n = A,T,C or G
actgcgcaaacagagaaagtcagtgttatccaggactttgtgaaaatgtgcctggaagccaacatcccacttgagaaggctgatcacccagcagtccgtgctttcctatctcgccatgtgaagaatggaggctccatacctaagtcagaccagctacggagggcatatcttcctgatggatatgagaatgagaatcaactcctcaactcacaagattgttgactaggaggttaccaccattgtgatcaagataaatgtggagtattaaagttatgtgttgattgtgtggntcatttttgtatttatttcattnaaaatcatgtgacgcanaatanttttgcaatgtgtatata

SEQ ID NO: 1885 - DNA, 432 bp, Homo sapiens
acttgaatcttcttttttttttttttacttttgagacagggtcttgctcttgctatgttgcccaggttggagtgcagtggcactatctcagctcactgcagcctagacctccccaggctcaggtgatccccccacctcagcctcccaagtagctggaattacaggtatgtgtcaccacacccggctaatttttgcagtttttgtagagtttggcttgctgagaggtagtggagcggggcagagcggtagcctcaaggatagatgtggaagatagtatagcatagcctgcctttgctggtgtgtggcgattaggcctggtggaactgccatcaataaatcaagcgtgatcagggtgaggaataggaaagaaggaaatatggggaaatggggtgaatatcaggtggatcagagagatacagtcatgggggtcag

SEQ ID NO: 1886 - DNA, 446 bp, Homo sapiens
acacagcttaaccacggccaggagcaagaattcgagttaaacgaattgaaccagtccaaccacaagacgataaagggaaacagggcgtggggatttccagtttttccttttacattacaaagtttccaacacaagaagccaacaataccccagtgctgcaccaagttacttcccactgtttcccaaggcacagttaattaataatcagtagtccaagttctaagaacatttcctggaaaacaaggacgcacctcccgtggctctatgcatggcctgccactgatgaatcaaattcttaagaacctacgaccgtctgatacccttgaggagagcaccctcatagaatctccagcatcaggcctcagttttcccatctgtaaaagacagccatgcaaagtgggagatccgctaggcttccagatcgaagtcatcgcgctcctcattgt

SEQ ID NO: 1887 - DNA, 306 bp, Homo sapiens
  misc_feature 159, 209: n = A,T,C or G
taatgagacaaagcctcatggagtttaagggaccagtattatatatattttcaaggacaagattaatgcagggaaattctaggacagagaacagctaactcaaacttttcccctttgcttccctctcaaattgcttacatagagaactgtgccaatacnaaagaaataaaggatatgctggcgtaactgaagaacaggcaactaaaaangttttggaagtaaacaaatgatatatgtataaaattccacatgctgaaagcaacttgggaggagcaggaacttcttatacattttgtagtacctgcc

SEQ ID NO: 1888 - DNA, 530 bp, Homo sapiens
acaacatgacttaaaactttttttttttctattaaaacttaaaggggaacaaaacttgaaaaagccctgttcttcagaaggtgagtgggttgagggaggcagtaatatgaagtgactgctgtgtattttaactaccagattttttatatttgccactgttaaatagttggaaaggggaaattctgattaagcgaaagtggtatcatcctaggtaagcttatttcagaacaagtctaatatttcagattctttcttttcgactttatactctgagttattacttactgtaagtggtgtatatgaaacctccatgcattttccagtatggatctgctaatatgcacagtaaatccatgtctttgtttgtttttctattaaaaagcaatcaagaaagataatgtgaaaaagaaaggaatttagaggtagggaaaagatgaatgtcagacatttgaagaactatagtaaaatgataaacactaaatatacttgagaaaactttcttaatatgccaatgaggtaggcctgatctt

SEQ ID NO: 1889 - DNA, 337 bp, Homo sapiens
agaatacaacgatggattttaaatactgtttgtggaatgtgtttaaaggattgattctagaacctttgtatatttgatagtatttctaactttcatttctttactgtttgcagttaatgttcatgttctgctatgcaatcgtttatatgcacgtttctttaatttttttagattttcctggatgtatagtttaaacaacaaaaagtctatttaaaactgtagcagtagtttacagttctagcaaagaggaaagttgtggggttaaactttgtattttctttcttatagaggcttctaaaaaggtatttttatatgttctttttaacaaatattgtgt

SEQ ID NO: 1890 - DNA, 340 bp, Homo sapiens
accaggaaatgcaaaggaagaacatcttaatatgtttattcagaatctcctgtgggaaaagaatgtgagaaacaaggacaatcactgcatggaggtcataaggctgaagggattggtgtcaatcaaagacaaatcacaacaagtgattgtccagggtgtccatgagctctatgatctggaggagactccagtgagctggaaggatgacactgagagaacaaatcgattggtcctccttggcagaaatttagataaggatatccttaaacagctgtttatagctactgtgacagaaacagaaaagcagtggacaacacatttcaaagaagatcaagtttgt

SEQ ID NO: 1891 - DNA, 350 bp, Homo sapiens
  misc_feature 44, 45: n = A,T,C or G
accagcagcttccacgaacagcccccaaactcctcatctatggnnacaggaaccggccctcaggggtccctgaccgattctctggctccaagtctgacacctcagcctccctggccatcactgggctccaggctgaggatgaggctgattattactgccagtcctatgacagtagcctgagtggttatgtcttcggaactgggaccaaggtcaccgtcctaggtcagcccaaggccaaccccactgtcactctgttcccgccctcctctgaggagctccaagccaacaaggccacactagtgtgtctgatcagtgacttctacccgggagctgtgacagtggcctggaag

SEQ ID NO: 1892 - DNA, 464 bp, Homo sapiens
acatgagaaggaacttccaggtgttactgtaattcctcaacgtattgtttcgacagcactaatttaatgccgatatactctagatgaagttttacattgttgagctattgctgttctcttgggaactgaactcactttcctcctgaggctttggatttgacattgcatttgaccttttatgtagtaattgacatgtgccagggcaatgatgaatgagaatctacccccagatccaagcatcctgagcaactcttgattatccatattgagtcaaatggtaggcatttcctatcacctgtttccattcaacaagagcactacattcatttagctaaacggattccaaagagtagaattgcattgaccacgactaatttcaaaatgctttttattattattattttttagacagtctcactttgtcgcccaggccggagtgcagtggtgcgatctcagatcagtgt

SEQ ID NO: 1893 - DNA, 335 bp, Homo sapiens
cttctgcagtcatcgagaagtcctggatcttttgtggttacaccagcatcatgtggcaagcagaggcgacttccggaagagacaggcaggcaccgtgaggaaggtggctgtgctctcccaggtgtctcagagacagatgccttatttaaaatcagcacgacatgtgtgagatcttctgtttcctaccccaaatcctgaaaccctgcagacactggctgactgggagaggtggggtctgtaagttgtcccctagtttgctaaaaaaatctaaaataatatttattatatgagttaggagagagagaatgggtccgcgtggcctcctctgcagatgt

SEQ ID NO: 1894 - DNA, 199 bp, Homo sapiens
actacaaacctacaagatccaggagtgttaggttgccctcggacatgccttcacgccattctaaacatcttggagaaaggaacggaagggagaacaggcccagtggcggtgcgagaatctcctcagctggctgagctatgttaccaggtcatatatcagttatgtgcatgctctgatacatctggtcctactatgaggt

SEQ ID NO: 1895 - DNA, 222 bp, Homo sapiens
acagctacagcttcatcaaccttagaacggagtgactctggagactcgagcatatgaagaagttctgaattatcaatctccaacaacatgccagtgattttaccggcaagagtagggtgcatggcttgaataagaggaaacagccgttcacccaacatttgcttttgctcttgaggaggggcagatgccaacatggaagcagtcaaaggttcctgaccttgt

SEQ ID NO: 1896 - DNA, 207 bp, Homo sapiens
actaaagcattcatggaggctcttcaggctggtgcagacatctccatgattgggcagtttggtgttggcttttattctgcctacttggtggcagagaaagtggttgtgatcacaaagcacaacgatgatgaacagtatgcttgggagtcttctgctggaggttccttcactgtgcgtgctgaccatggtgagcccattggcaggggt

SEQ ID NO: 1897 - DNA, 187 bp, Homo sapiens
acgcttatcctgactgagggagattcagccaaaactttggctgtttcaggccttggtgtggttgggagagacaaatatggggttttccctcttagaggaaaaatactcaatgttcgagaagcttctcataagcagatcatggaaaatgctgagattaacaatatcatcaagattgtgggtcttcagt

SEQ ID NO: 1898 - DNA, 544 bp, Homo sapiens
gcggcggcggcgttgacaatgagttttcttggaggctttttggtccaatttgtgagatcgatattgttcttaatgatggggaaaccaggaaaatggcagaaatgaaaactgaagatggcaagtagaaaaacactatctcttctatgacggagaatccgtttcaggaaaggtaaacctagcctttaagcaacctggaaagaggctagaacaccaaggaattagaattgaatttgtaggtcaaattgaacttttcaatgacaagagtaatactcatgaatttgtaaacctagtgaaagaactagccttacctggagaactgactcagagcagaagttatgattttgaatttatgcaagttgaaaagccatatgaatcttacatcggtgccaatgtccgcttgaggtattttcttaaagtgacaatagtgagaagactgacagatttggtaaaagagtatgatcttattgttcaccagcttgccacctatcctgatgttaacaactctattaagatggaagtgggcattgaagattgtctacatata

SEQ ID NO: 1899 - DNA, 512 bp, Homo sapiens
acaagatgtgttactatcgctttggacaggtttacacagaagccaagcgtcctccaggctttgaccgtgtccgaaatgctgagattgggaataaagactttgagcttgatgtcctggaggaagcatataccacagaacattggctggtcaggatatacaaggtaaaggacctggataatcgaggcttgtcaaggacataaatgtcacgtccagctctgatatgcttcgcactgagcacatcacatttaggacgttgaagatttttttttttttttaatatgcagtttgtaagaacaaaactggatggcatcagaattgtctggaagttttgtcttgggcagtatgggctgggccaaatgaaatgatttttataattctaaacaggttaccaaatgaaatgtcatggctttactttggtcaattaaaggggggaatttttttaaaaaatgtgccttatttgttttgacttataactgatttgagggaggcaaaagctatgctaggctgccaga

SEQ ID NO: 1900 - DNA, 553 bp, Homo sapiens
  misc_feature 417, 488, 489, 501, 544: n = A,T,C or G
taggtattcctgatgacagtctgcctctatcttacagtaagttgtttttcgaattctatgggcctattatctaatagataacttagccattttgatatttgttaccaaagcctgcttaacccataaagttttctggttcctcttgttctctgtagtgatgtttctagatagatgcccactgatatatgccccttttttctcagatagatgcccactgatctgcccagggtcagacgaatgcttgtcagttgtagctttccaggattctgctccaatgaggaggaaacatcctgccttacccctgttttagcctgggaaccagtaattgtgaactcaccagggttaacatgaagagggcatgagagcttattccataaggaattgtctgagacatttggttaccttttcttagtttgnccattagcaaccgtaactaaaatagttttggctgtttttgggataattagctaattgaatgattttttcgnntcaggagcaagnttgttgctatataccattgaaaaagccttcagagctgagaggntagttgata

SEQ ID NO: 1901 - DNA, 195 bp, Homo sapiens
actgactggatatattttatgggcatgtagtgttgttaagtggtaaaatttaaagacatttaacctaaatgttccattttctcttaagaaaaaaaaggaagacgttttaataggaaaagaaaaacaagaagcagtagcagctaggtaatttaaactgagattaaaaaataaacatacacaaaaaatacaaaaagt

SEQ ID NO: 1902 - DNA, 288 bp, Homo sapiens
  misc_feature 69, 70, 243, 244, 251, 271: n = A,T,C or G
acaattacccaccactggatttgactcagagaggacccccagagggtgtctccatcttccctatttatnntcagcccttgagggcttcattgtagatcaaagccaaggcccccaggaaggtgacatactcctggaagttcacctcctggtccttgttccggtccaagtcttccatcagccttgcaatttcagcatcctgcagcttcgagccaatggtgagctccttctggatcagctccttcnnctccttnttgctcagggtgtgcttgtnaccctccctgccggagt

SEQ ID NO: 1903 - DNA, 220 bp, Homo sapiens
  misc_feature 12, 13: n = A,T,C or G
acaattacccannactggatttgactcagagaggacccccagagggtgtctccatcttccctatttattttcagcccttgagggcttcattgtagatcaaagccaaggcccccaggaaggtgacatactcctggaagttcacctcctggtccttgttccggtccaagtcttccatcagccttgcaatttcagcatcctgcagcttcgagccaatacctcg

SEQ ID NO: 1904 - DNA, 371 bp, Homo sapiens
gcaggggcccttagagtcttggttgccaaacagatttgcagatcaaggagaacccaggagtttcaaagaagcgctagtaaggtctctgagatccttgcactagctacatcctcagggtaggaggaagatgacttccagaagcatgcggctgctcctattgctgagctgcctggccaaaacaggagtcctgggtgatatcatcatgagacccagctgtgctcctggatggttttaccacaagtccaattgctatggttactccaggaagctgaggaactggtctgatgccgagctcgagtgtcagtcttacggaaacggagcccacctggcatctatcctgagtttaaaggaagccagcaccatagcagagt

SEQ ID NO: 1905 - DNA, 361 bp, Homo sapiens
acactggtttgctactcatggcaagaaacagacaaagccccatgaaaaataaaacaaaacaaaagtcatttcaaacaaagctgttgttttgaaaactcttgctttcttttggtgtccattttgtgttctattttaaagaatctttcatttatattggtgttattgtagtgaagagaatgtgataggctgatctgtaatggtttctgtcaggagcttagcaaatgcctctgcccctcttcccctacccctgtccttcctcagttcccagctgggattgctatgcactgggcagacccgtcactgtctcccctgaacccccacacagtggcttcccttagaaccagtctttgtacctcggccg

SEQ ID NO: 1906 - DNA, 472 bp, Homo sapiens
  misc_feature 137, 275, 280, 282, 291, 311, 318, 349, 372, 381: n = A,T,C or G
cttttttttttttttttttttttttttttgggcaaaattttttattatgaagatacagatctaagaacagaaggataattatgtgctagcttatatatagttccttgtaaaaataatgatacatgaaaaattagtanaaaatgaaaatctgcagttatctgatatctgaaaatgttaagcaatttcccctgcatcttagttctaatcacttttgcagaataatcaagcatatttgggtgaagagagtatttaatgattccatttttattaatagngtagngngcccttcanagcttggcgtagtctttaanaatcatntgaagtttctggctcagcatgatgttccctntggccttcagcctgccactaaanaatgccttntgagggtcaagcttgcccaggaccacctccatgaaatcttcatctgaaagtatgattgttgtatcagcagcaccttttgcagggccttggt

SEQ ID NO: 1907 - DNA, 309 bp, Homo sapiens
actaactacagatagaagaaaaacagtattaacatgtgtattacagcactgcagttcactttctggatttgtgacacacaaacacatcatgcattctaagaagttaattttattagtgtcactagtgatgttaattaaaaaacttatagcaagtgctcaaaactttctaaatattgtaatcactatgttttaaagacagagtggactgttacaaatgattttgcaaaatacaaaaatagatatacttccactgaatgctttaatcatttttccgggcactctcatcttttggttcttcctcatctgagt

SEQ ID NO: 1908 - DNA, 283 bp, Homo sapiens
actgtatttatatttgtgggtggcagctctcaaattatttatccatagtccagatttgttttgttgcatttgctcttaaaatgcattgttgtatactccatcacagatgtgtcaaatactcctgctgtcttttgaggatgtagcaaaacctaaacctgctactttaaaccaaagtcctttttttattattgtaaagctgacattttactctgatttaagcacctgaagtgtattttgactaatttatattctgagctaaaattaagaacctcaggatttgtgt

SEQ ID NO: 1909 - DNA, 429 bp, Homo sapiens
  misc_feature 203, 204, 370: n = A,T,C or G
accaccacacccggccaatttttttatttttagtagagtgttgccacgttggccagtctggtctcaaactcctgacctcaagtgatccacctgccttggcctcccaaaaaggactgggattacaggcatgacccaccatgcctggcccaatgttaacacattttgaaaaataagacaatcatggaaataagtgatgacactanngaattattcttttaggtgtgataatgatgacttgcagttatgtttttaaaagacttcatacctttagagatatatatttaaatacttacagatgaaaagacatgatgtctgctgtttgcttcaaaataatcttgggtggggaagagtggggctacaggtgaaatangacagacctggagttgactattttggggactggggaatggctacatgggggttcattgt

SEQ ID NO: 1910 - DNA, 257 bp, Homo sapiens
actcagaggcacttccctcctaagtcaaagaccatcctcactgactatgtgccaacgcctcgtttcaggcttgtgactcaacaaagggcttttccattgatagaagcagtttgggatttgtagttgcgacttcttcgatagttacctgcacgtccattgctggcaactgacttgtcattaaaacctggctctttggttaagggagctacgctgtggtttattcttaagttacgtggataaactaacctctaaaaaaa

SEQ ID NO: 1911 - DNA, 274 bp, Homo sapiens
acctcaccatccacagtgaccatgagggtggcaatgtaagtgcccataccagccatttggtgggcagtgccctttccgacccttacctgtcctttgcagcagccatgaacgggctggcagggcctctccatggactggcaaatcaggaagtgcttgtctggctaacacagctgcagaaggaagttggcaaagatgtgtcagatgagaagttacgagactacatctggaacacactcaactcaggacgggttgttccaggctatggccatgcagt

SEQ ID NO: 1912 - DNA, 197 bp, Homo sapiens
acgagtaagggtttgatctacaaaagagctcacatggacgcactgagaacgcctgccagcttccccatgccctcacttggtttgtgttttaggttaagtagtcagtgcccacatcacttcactgtctcaagactgagcacttcactaaatggtagattttactgttaaagaccctacaataagattgttttatctgt

SEQ ID NO: 1913 - DNA, 302 bp, Homo sapiens
acaacagatcaagaagtatggcagtgacaactcgtttgacatggttgcacgaaaagatcctgcaaaatcattttggagggaagcggcttagccttctctataagggtagtgtccatggattccgtaatggagttttgcttgacagatgttgtaatcaagggcctactctaacagtgatttatagtgaagatcatattattggagcatatgcagaagagagttaccaggaaggaaagtatgcttccatcatcctttttgcacttcaagatactaaaatttcagaatggaaactaggactatgt

SEQ ID NO: 1914 - DNA, 322 bp, Homo sapiens
acttctgcaggtgtttctctgtggcagggtaaaccacggtcgtctttacatcattcagttgtcttggagggaacaagtgataggtgctgtagatatcattggagaactgcaattggagctcagggctgcccgtcaggagctgagccacctgttccacctgaaatggcgtcttctccaggatcacaacggcatcctctccatccccatccccagaggcctcattcaccttcccgtgtaggaaaatgattttgtcccgcgcagactccctcagcaccttctgcagtctgaagccggagaacggtaagcggacaggagcacaggt

SEQ ID NO: 1915 - DNA, 333 bp, Homo sapiens
accatgcactgagtgactgtggggatcatgttgttataatgaacacaagacacattgcattttctggaaacaaatgggaacaaaaagtatactcttcgcatactggctacccaggtggatttagacaagtaacagctgctcagcttcacctgagggatccagtggcaattgtaaaactagctatttatggcatgctgccaaaaaaccttcacagaagaacaatgatggaaaggttgcatctttttccagatgagtatattccagaagatattcttaagaatttagtagaggagcttcctcaaccacgaaaaatacctaaacgtctagatgagt

SEQ ID NO: 1916 - DNA, 246 bp, Homo sapiens
acagacccagaaagaacaggtagtgagtagttatggtctcagcctctccagtcttgctgatcatgaagagctggggcaggatagccactgattccagatagatagagaaagtccagaggatctccagcagagtgaaactgtagttttcaaggaaggaaaggccaatgactgggaccagaagaaactccaggcggaatgtgtcattctcactgtcaaaagttttacggaatttcccatatatcatgt

SEQ ID NO: 1917 - DNA, 282 bp, Homo sapiens
acaaatgcaaatactgttcccttgtgtcaattacatacagcatgcctacaaagagagaatggtaattcttcttcattcacagacaggacacatggcagtgcactattcaaaatgctttgataatcttaatttttgtttctggtgctgagatattatgaaaggaactgcatttgcaacttattaaatacttccaggaacaaatagttcactttgcttgggacttgtagttttgagtaattaatcatccatggagcaggagccagtcaggagatacccgttggt

SEQ ID NO: 1918 - DNA, 460 bp, Homo sapiens
acatattaagataaatgtcatgtgtaagataactgataaatattggaactttgctagaacaagaccctgtagtaatagtaataatagttgaagtttggccaactcttaataaagttattttggtaactaatgttttatggcacttaagaataattagcagcgttaaattttgtttgtattaagcacttttaattttatccttcctaaaaatagtttattgtatctgacaagaaacttacttaaccattgtgtccttcccatcttttttgtcatctttgttttcttcaaatgccctcctcccatctgccttgagattccctcgtcttcacttaaaagccagagtgcaagtcatgatttgcgggagggctcttgaaccacttctggctgcaccacaattctgtacctgcccgggcggccgcccgggcaggtacctggagctgcagacctgggggttgcccat

SEQ ID NO: 1919 - DNA, 515 bp, Homo sapiens
accgaccatagagcaagaatcaagattctgctaactcctgcacagccccgtcctcttcctttctgctagcctggctaaatctgctcattatttcagaggggaaacctagcaaactaagagtgataagggccctactacactggcttttttaggcttagagacagaaactttagcattggcccagtagtggcttctagctctaaatgtttgccccgccatccctttccacagtatccttcttccctcctcccctgtctctggctgtctcgagcagtctagaagagtgcatctccagcctatgaaacagctgggtctttggccataagaagtaaagatttgaagacagaaggaagaaactcaggagtaagcttctagcccccttcagcttctacacccttctgccctctctccattgcctgcaccccaccccagccactcaactcctgcttgtttttcctttggccatgggagggtttaccagtagaatccttgctaggttgatgtgggccatacat

SEQ ID NO: 1920 - DNA, 510 bp, Homo sapiens
  misc_feature 15: n = A,T,C or G
acaaccataatgcangttatgttttgcatacaaaatatgttctttacatcaaagcacatgttaacaaaaacaagttctagaaagcatataccctctaagactaatgaaaacgtctttagcagggaattaaaaaaaaattaacattcatttgataaatattttgtagaacttgaaatgaggattttatctctgagtattttttgtagtattccccttgtccagtttttgcagaagaatggcaaacacttatttctaaaatgaaatagccctggaaacacccagtggaattttttcaaagtaaatgtctagccttaacttgaagttcaagaagttgtagctacatactacattagtaaaatctgaaataaaattattcccagttaatctcttcacagtttcttaaaaaaatattagtggagataaattatctaccaactttaaaaatctaaacttatgttcactgaacaaaaataaatttagtttcagaacattgcctgttaacggcaaagt

SEQ ID NO: 1921 - DNA, 257 bp, Homo sapiens; identical to SEQ ID NO: 1267

SEQ ID NO: 1922 - DNA, 221 bp, Homo sapiens
acaataaatagagtgctctccaatcatggtgaatcctttattacatgcatacgttacagactgtctatatccataatggtcacgttccccttgaattattccattgtcaatttgtggtggtgctggacaataaatttctctgcactctggcaacgggtcactccactggacagagctgcctgaaataagacaaaaactagaagtcgagccaaataatttgt

SEQ ID NO: 1923 - DNA, 355 bp, Homo sapiens
accatttaagtcagtttcttatttgagtatgaggtgtctatacatttctataatttaagattttggtaacgcttcatatcaaatgagttgtagatctacttaacgtatgacttctccttccaaagaaggaaggaaggctgacaagggagggagaagggatacctgctaatgatgatgtgctagaaagacgactcattacatgcttatcattgctggaaggacttcttccctccactgagccgtgggatgtcataagagcccttcgaagagctctttttggagttttggagaaagagaatgctcttgtaaccttttttgaagtcttttttattgctcttgatgctctactcaatgt

SEQ ID NO: 1924 - DNA, 420 bp, Homo sapiens; identical to SEQ ID NO: 1848

SEQ ID NO: 1925 - DNA, 196 bp, Homo sapiens
catctctccctcccaaggaaaaagaagtgtgactactggatcaggacttttgttccaggttgccagcccggcgagttcacgctgggcaacattaagagttaccctggattaacgagttacctcgtccgagtggtgagcaccaactacaaccagcatgctatggtgttcttcaagaaagtttctcaaaacagggagt

SEQ ID NO: 1926 - DNA, 257 bp, Homo sapiens
  misc_feature 49, 50: n = A,T,C or G
actcccgattgaagcccccattcgtataataattacatcacaagacgtnntgcactcatgagctgtccccacattaggcttaaaaacagatgcaattcccggacgtctaaaccaaaccactttcaccgctacacgaccgggggtatactacggtcaatgctctgaaatctgtggagcaaaccacagtttcatgcccatcgtcctagaattaattcccctaaaaatctttgaaatagggcccgtatttaccctatagt

SEQ ID NO: 1927 - DNA, 113 bp, Homo sapiens
  misc_feature 55: n = A,T,C or G
tggttgggggccgtcccgctcctaaggcaggaagatggtggccgcaaagaagacnaaaaagtcgctggagtcgatcaactctaggctccaactcgttatgaaaagtgggaagt

SEQ ID NO: 1928 - DNA, 119 bp, Homo sapiens
accttcagaatgcgattgagagcagacaggctcggcccacctatgcaacagccatgctgcagagtctgttaaagtagatgttgcacaccagccttacagctgggagcctttgccatggt

SEQ ID NO: 1929 - DNA, 331 bp, Homo sapiens
actttggcctctctgggatagaagttattcagcaggcacacaacagaggcagttccagatttcaactgctcatcagatggcgggaagatgaagacagatggtgcagccacagttcgtttgatctccaccttggtccctccgccgaaagtgagcggagtttgtagagcttgcatgcagtaataaatgccaacatcctcagcctccactctgctgattttcagtgtaaaatctgtgcctgatccactgccactgaacctgtcagggaccccggaggcccgattagaacccaaatagatcaagagctgtggagactgccctggcttctgcaggt

SEQ ID NO: 1930 - DNA, 310 bp, Homo sapiens
accctaggggttctggaagggaaaacatggaatcaggattctatagactgatgggccctatccacaagggccatgactgggaaaaggtatgggagcagaaggagaattgggattttagggtgcagctacgctcaccctaaacttttggtggcctggggcatgtcttgaggcccagactgttaaccaggctctgctggcctgtttactcgtcaccacctctgcacctgctgtcttgagactccatccagccccaggcacgccacctgctcctgagcctccactatctccctgtgacgggtgaacttcgtgt

SEQ ID NO: 1931 - DNA, 364 bp, Homo sapiens
acttaatttctctttttaatttaagtgatctttctaattcgaaagctgtgttctttttgaataccgtgcatgggggttaagctgatgttaaaacagtttgcagtaaaaaaaaatgaatcagcttaagtcatttaatcatttcaagtgcattctgcatcctttaaaaataagtttaagaaatttaagagaattgtgttttcattaagttttgcatatcttttgttatgccatgtaaattccctttttcgtatgattaaaggaaggttatgataaaatgattagttcatttacattcacttgtagcaattacatgagaatttgaattttgtcgtgtttgggtttgttcattcctgtgaatgatggt

SEQ ID NO: 1932 - DNA, 145 bp, Homo sapiens
  misc_feature 17, 18: n = A,T,C or G
accaggtctgtgcaccnnatatgaatgtcttgaagagtcatgtggaacaacttgtccaaaatcaattcatatgaaagctttcagagtaaatttttttttctagctataagcatgcaataataaatctcaaacactgatttggagt

SEQ ID NO: 1933 - DNA, 308 bp, Homo sapiens
acatttattcttaacacgtggaacatatagtataaagatttcatactgaataaatgatattcattaagccaaaaaaggaaaaaaaggaggaatttacatcaagttttagctacattgttgaaatacaaatatgcagattttatcactgaaaaaatctcaattgtgtttcttcatcagaacttcaactgaacctagaactttttcacacctcgattagaaagaaaacaaaacaaaacaaaaacccagaaaaaaataaactataagttgattggctgctgagacagcaaggactttttacagagacctgt

SEQ ID NO: 1934 - DNA, 363 bp, Homo sapiens
actagaaccataaagttctatctgatggtaaattatgtataaaactaagataaaacagataattatgctctatctcatatctactgaaagtagaaaaggaggaagagtgacacttttaaatcaaactgctctagttttagcttagtggatggttaataaacacactgctttacgctgaagtgatcagatagctatttctacagttcagaagaacttaaaaatcaggttttaaagacaaaagaaagcagactcaaaacacagacaaagcagagaagaaaacaatgcccatgagatggtcactatttagacagtattataaaaagctaaagaacacttgggctttacttcactttgatgtcttgt

SEQ ID NO: 1935 - DNA, 177 bp, Homo sapiens
ttcaaacaggatgacaatccccatgcatgtgatatgcttgctttctagattgagtcactcactgtcatgactgcccatcctcattgcctgtgcttcccacttcaccactctctcacattggctgttcatggaaggctgttttctgtgctctcatgcttctcccctcgcgtttcctgt

SEQ ID NO: 1936 - DNA, 521 bp, Homo sapiens
atcggaggtgcctcagccatggcatggatccctctcttcctcggcgtccttgcttactgcacagaatccgtggcctcctatgaactgactcagccaccctcagtgtccgtgtccccaggacagatagccaccatcgcctgctcgggagagcaattgggggataaatatgtttgctggtatcagcagaggccaggccagtctcctctactgatcatctatcaaaataccaagcggccctcagggatccctgagcgattctctggctccaactctgggaacacagccactctgaccatcagcgagacccagtctatggatgaggcggactattattgtcaggtgtgggacagcagcctgggttatgtcttcggaactgggacaagggtcaccgtcctgggtcagcccaaggccaaccccactgtcactctgttcccgccctcctctgaggagctccaagccaacaaggccacactagtgtgtctgatcagtgacttctacccgggagctgtgacagtggcctg

SEQ ID NO: 1937 - DNA, 216 bp, Homo sapiens
acctactggtgctgaaaaaaggaaaattccggcttgaaggaaaggagtttagaactctgaaaatttggtgacattgtttttccctgaaagaaatgtgtgttggatttaacagatgaaattatctgccctccaaaagtcctttagaagagccagtgcaaggctgaagaccaaagcgtcaagaacacgccagactctcagcttcctctgctttgctcc

SEQ ID NO: 1938 - DNA, 359 bp, Homo sapiens
ctcctgtggaggcctgctgggaacgggacttctaaaaggaactatgtctggaaggctgtggtccaaggccatttttgctggctataagcggggtctccggaaccaaagggaacacacagctcttcttaaaattgaaggtgtttacgcccgagatgaaacagaattctatttgggcaagagatgcgcttatgtatataaagtaaagaacaacacagtcactcctggcggcaaaccaaacaaaaccagagtcatctggggaaaagtaactcgggcccatggaaacagtggcatggttcgtgccaaattccgaagcaatcttcctgctaaggccattggacacagaatccgagtgatgctgt

SEQ ID NO: 1939 - DNA, 523 bp, Homo sapiens
accaagttttagatggagcaggattagatattgatttccatcttgcctctccagaaggcaaaaccttagtttttgaacaaagaaaatcagatggagttcacactgtagagactgaagttggtgattacatgttctgctttgacaatacattcagcaccatttctgagaaggtgattttctttgaattaatcctggataatatgggagaacaggcacaagaacaagaagattggaagaaatatattactggcacagatatattggatatgaaactggaagacatcctggaatccatcaacagcatcaagtccagactaagcaaaagtgggcacatacaaattctgcttagagcatttgaagctcgtgatcggaacatacaagaaagcaactttgatagagtcaatttctggtctatggttaatttagtggtcatggtggtggtgtcagccattcaagtttatatgctgaagagtctgtttgaagataagaggaaaagtagaacttaaaaactccaaactagagt

SEQ ID NO: 1940 - DNA, 378 bp, Homo sapiens
acatatgtgaactcattggaaatattgtgtgtttaatgcaaatgatatattgaattgtttagcaatttgttttctttgcttaacgatgtttttgagatctgtgcatgttacttaatgtagctcaatccatcttctgtaattgctgtatagattgtcatcatatgattaccacattttacttacgcatttcttttgtgatggacattaagactgtttttaggttttgctattacaaaatactacacaggagcatcactatgcctgtgtgaaagtatatgtatgaaagtttacctagggttgattcctagaagtggaattgcaaagtcataggatatttatatattggtttttaataatacttccaaattgccctcctgt

SEQ ID NO: 1941 - DNA, 423 bp, Homo sapiens
  misc_feature 352: n = A,T,C or G
tcttaatacagggatgatctcatagcatttagatatcagaaaaggttttgacctatatgtctttaatattttttgaatacatgtataatctttatcattcctcagtgtttcatttctcaaattctgtaaaaggaatataagaggaaagacaattcatatacaaagacaacgagattaaaaatatgcagtaggaaaaataattacttaaggggagattttttttacatgaaatctgggctttggatgtgtgtgtgtgtgtgtgcacatatgcactgtggtgggagtggggcaacttggggaatatgttacatgtgtgactttgttttgccctggcaaagttaatgttgttcanaaagggtaaatgtttggacacttgcaattgctcatggatgaatttatatgttttagtcatagaaaaattgt

SEQ ID NO: 1942 - DNA, 292 bp, Homo sapiens
acctgactcaccaggtggctatgaggatgcagtcatgataaatgtaattgctcatatggcacctggtttattcaaaaagtgtttttcaaacatctaggtggcagattctgttacataagtaatggagagacagtggtgaactaaacaggcaaaaatttctgctttcatggagctgacattctggtaggcacaaagcaagccttaatatgtaaaatctatctcattataagaggaagtgatgtttgttagcatctgctgtgtgccgcagttatatggaggacctaaaaaaaaa

SEQ ID NO: 1943 - DNA, 394 bp, Homo sapiens
acgcgaaattgtgttatgactgatagccttcagctacaaaaagataggactgacctggtttaaagtgttctattttgtaaatcattccatttgagtctttctgatgaacttggctatactgaaatctgttattttagtgaggctccaaaatgagcaaagctaggcctgattagagtagagtgactattaaaaaacataactttctaggagccataaatcaaagttttaaaaagatgtttggatatatttgagtattccgatcatgaaaacagaaattgccctgcctactacaaggacagactgatgggaaattatgcacctggtcaacttagcttttaagcagacgatgctgtaaaaactaacggcttctctgatatttattgtaagttttagt

SEQ ID NO: 1944 - DNA, 530 bp, Homo sapiens
acacacatgttctcatatatgtatatatacatacatattcatatatgtgtatacatatatacatatgaaacaagtttttaaatgttggcagcatattttcacaactgcaacctaaacaaccactggaagtgggggtccacttaagttttgtttgccattagcttaataggggaaagctattttaattttccctgcaactttttggatatgagttatgatctcaaaatgtcatttaactattgcactaaaaagtaatttgaccttggaactcctttctagatggaaggagaataaagacatctgtagcatgtaattctatttttatttcttgactacataacctagcagtggtctaatactgaccgtttcaatttaaatgctggaaaaatactgaccaagactttctgtgaaaaagataatggaaaacagaaaccagttagtaaagccatgcaaataggaagtgattttcagccccaagaggactttgtatcatctatggctccatttaaacccaagtagcatctgtcctg

SEQ ID NO: 1945 - DNA, 329 bp, Homo sapiens
ggagcctgaactgacatcaactcccaatttcgtggttgaagttataaagaatgatgatggcaagaaggccctcgtgttggactgtcattatccagaggatgaggttggacaagaagacgaggctgagagtgacatcttctctatcagggaagttagctttcagtccactggcgagtctgaatggaaggatactaattatacactcaacacagattccttggactgggccttatatgaccacctaatggatttccttgccgaccgaggggtggacaacacttttgcagatgagctggtggagctcagcacagccctggagcaccaggagt

SEQ ID NO: 1946 - DNA, 480 bp, Homo sapiens
  misc_feature 403, 459, 471, 472: n = A,T,C or G
acctcagaatagggcacctgtaagtcagtcagtgaagtctctgctctaactggccaccggggccattgtcttctgacacagccttgccaggaggcctgccatctgcaaaagagagttcactccttccgctattttcatgtgagtgtatccaatttccttgataagctccagtttcaggtattctgccatttggaaagttttacacactcgaaagatgttgccaatgatatcttctggtgagtagcccagatgccacaagtgagcaagaatcttgtaggcttcatcaatgttggcattcacacagtgctggatcatctcctttaccagcagtgggtggggctcgtcacagaccttgaacacgttctcactgttaatgaagccaaatcctgagaaggtggactgnaggttgttcagcgcctgcctcatgtctccctgggccgtgaagatgatggcttctangccgtcatcagnntagggtac

SEQ ID NO: 1947 - DNA, 498 bp, Homo sapiens
actttttacccccagcatttatgatgtaaatctctttctctatggattatatctgtttaaagcattctttctaggttattttggggggacagtgccaagtccatctttgcccagtcaattcagtgattgatagcaatttacattaattgcagtaaagctctttggattagaaattagtgtggggaaagcttattctgttgttgtttttgtttactttcatatgatgaaaatgctgtgtttaagtgtttgtcaataggaagaatggaaaactgttgggatgatgtggtttgcaggttgctgtgcctgattcacagtgtatgttgtataagccaatgtccatacctgattatgagagcttcttaaattatatgatatcaaatttgttcctgtaactctgtatacagtgcttttctgcaaggtaaaaataacctgtctatgcatctgatttttgctacagtttagacactgtggtttacaaaacagcatgcactcaacttg

SEQ ID NO: 1948 - DNA, 289 bp, Homo sapiens
actggttaatgaagctaacttcaactagtggaccatgggtagtttagaaaaacacatttccaaccatccatccgcacgcaatgcacctttgtctctaacatcctactgatcttggaaaacacaggccatcagaaaggatgagcaggggctctgaacttattttaagatctcgcaatgccagcaacggcccctttgttgggataagtttacaggtatatttcacaggacaaaaacgcttgtaggaaaaacatggttgggtgtgtgtatactttgatgatgaagatttcac

SEQ ID NO: 1949 - DNA, 207 bp, Homo sapiens
acttacgccataccccagaatacaataaataagcaattagaaaacgttcaagtatgaagggatttcctcctccccgccaaaagcactgctctctgaaggaagctggtttctctgtagctacaccagctgttcagaagctcattggacctggttttgaaaataaaacaaagttaaaaccctgggaggagttattgtgcagtgtggagt

SEQ ID NO: 1950 - DNA, 454 bp, Homo sapiens
acatttgtatacctgtaatgtaaatgtggagaagtttgaatcaacataaacacgttttttggtaagaaaagagaattagccagccctgtgcattcagtgtatattctcaccttttatggtcgtagcatatagtgttgtatattgtaaattgtaatttcaaccagaagtaaatttttttcttttgaaggaataaatgttctttatacagcctagttaatgtttaaaaagaaaaaaatagcttggttttatttgtcatctagtctcaagtatagcgagattctttctaaatgttattcaagattgagttctcactagtgtttttttaatcctaaaaaagtaatgttttgattttgtgacagtcaaaaggacgtgcaaaagtctagccttgcccgagctttccttacaatcagagcccctctcaccttgtaaagtgtgaatcgcccttcccttttgt

SEQ ID NO: 1951 - DNA, 166 bp, Homo sapiens
acaggacacaggcactcctttgtctggtagagaggaggaggggaaatggagctattccaggatacaagggatggcactgagggatgcataagtcccctgcctcccttgtctcaacatgttctcctctgccagcccagtcagcttggggagctaggtatcagaaacc

SEQ ID NO: 1952 - DNA, 220 bp, Homo sapiens; identical to SEQ ID NO: 1076

SEQ ID NO: 1953 - DNA, 276 bp, Homo sapiens
actagtgggtctctgctcccagtctcttctctgtgccagccgtcgtggcctactggaatggcacagagagcttttcttttcgttgcagaacagcctggaacatgacatgctagatcaatgtccatacacgtccacagaaataaatgaatgttccttctgccatgactcatgtctcggggacaacgggttcgcccgtctagggtgtgagctgacgcacacttcactccctctgacctggaatgtgtggggcttctaactgcggttttcaggttttac

SEQ ID NO: 1954 - DNA, 448 bp, Homo sapiens
acttaatttgcatgttccatttcaaaaagttgtttttaagatttcagagaatttttttcaaagaaatttcttaaagctaacttcatttagagcttggcaaaatgtatcagccaggcacagtagttcatgcctgtcatcccggcacttaaggaggccgacacaggaggatggcttaagcccaggaatttgagatcagccttggcgatagagcaagaccccatctttacaaaaaaatgtttaaaaattagctgagcctggtaatacatgcctgcagtcccatatgcaaaacatagctggggctacacgggagggtgaggcaggaagatcacttgagcctgagagttggaggatgcagtgagccatgattgtgccactgcactccagactgggtgacagagtgagatcctgtctctaaaaaacaaaacaaacaaaaagctaaaaaaaaaaa

SEQ ID NO: 1955 - DNA, 577 bp, Homo sapiens
  misc_feature 473: n = A,T,C or G
acaaacccaggcctgggcctaggaaagggcagaagaaaggcaaagggtcccttggagcaggaacccatccctctctgcttatacccagcacccctcatcccaggttcctttcttcaacctccgcctgcctctgggaacacagagcaccaagaactgacaaaccgggaccctccagggccacagcgtggggcagagtccaggcttctgtctccccgcagtgggagatctggggagctcagtgaacctcctcaccctcctgccagtatgaagttgggaagcgccttctctgtcccccagaacagaacaaactcttgttctctgtggttggggaaaaggtgtggggggcttggacctaggaagaagctgagctgaattcctccagggcccaggtgaaacccccaggggagtttctgagactctagacttgccatttctccacttttccttcccaatgactccggtgagcagctcanagtctggctagggcaactggtaggacagtggggatctgccccagagacatctgtgggtttcagatgaaggtttccccaacaccagattcatttatatgtacctg

SEQ ID NO: 1956 - DNA, 327 bp, Homo sapiens
acctgggagagctgcaaacagccatggagataagagaggcggggagggaacacagtgactgagtctgagagacagcaaagcacctctccagcgaaagccactccgagatgcagcctaacttcctagtttgcatcagcaagatgagcaggcaccaccatggaaagagcacctggggtgtagctggttaccacagctcagccacattccccagaaacggaggtcagccctccatggcccaggaaaacatgggggatgaagggttggcacctgcagtgaccagatggagatacaatgcaggcagctgctaccatgcttggtgaccagggt

SEQ ID NO: 1957 - DNA, 179 bp, Homo sapiens
  misc_feature 58, 83, 84, 93, 94: n = A,T,C or G
ctgtggccaaggccccagtgaaagcagctaccacccctacccggaagagttctagcantgaggattcctccagtgacgaggannaggagcaannaaaaacccatgaaaaataaaccaggtccctacagttcagtccccccgccttctgctcccccaccaaagaagtctctgggaaccca

SEQ ID NO: 1958 - DNA, 321 bp, Homo sapiens
acctaataatatgttaacataaacataacaacacacatattatttttctaccccttggcaactgaaaatgaagttaccattcctaggccaaatttttagacaaagctttctaaaaccatctttataaagtaaattcagatatgcttacaataaaaagacataaaagattcatcctgagatgaattctgagtcaataactaaaaaccatttctaccagtgcatcactaccatgtaatccattctacgcaagctctacaaatattgagtcaaatcctgtctgtcagaaaatgaagacccaataagtttgccgaagtattcagt

SEQ ID NO: 1959 - DNA, 480 bp, Homo sapiens
  misc_feature 450: n = A,T,C or G
gggatggaaccctgcgcctctgggatctcacaacgggcaccaccacgaggcgatttgtgggccataccaaggatgtgctgagtgtggccttctcctctgacaaccggcagattgtctctggatctcgagataaaaccatcaagctatggaatatcctgggtgtgtgcaaatacactgtccaggatgagagccactcagagtgggtgtcttgtgtccgcttctcgcccaacagcagcaaccctatcatcgtctcctgtggctgggacaagctggtcaaggtatggaacctgactaactgcaagctgaagaccaaccacattggccacacaggctatctgaacacggtgactgtctctccagatggatccctctgtgctttctggaggcaaggatggccaggccatgttatgggatctcaacgaaggcaaacacctttacacgctagatggngggggacatcatcaacgccctgtgcttcag

SEQ ID NO: 1960 - DNA, 272 bp, Homo sapiens
cttccagttgctcccagaactcgaacttctcaagaagaattgctagcagaagtggtccagggacaaagtaggacccccagaataagtccccccattaaagaagaggaaacaaaaggagattctgtagaaaaaaatcaagattactatgacatggaatccatggtccatgcagacacaagatcatttattctgaagaagccaaagctgtctgaggaagtagtagtggcaccaaaccaagagtcggggatgaagactgcagattcccttcgggt

SEQ ID NO: 1961 - DNA, 354 bp, Homo sapiens
acaaaacagaatgaattcttaaggcatatcagaaatgctgagtcccaggccggggccctgccccagccagggctgggactctgcagttgggagcttgtccagctgccccctctaatgcttttctcctccaggacacagggagcctccggaagcacagtagtccccgtgtgtcaccttaggctgacctctgtccccaggggtgacgtaatgctgtcactgtcttgaattcttcatcgtttaacagggagcccagtgttttcactttgcgcattgggtatctggtcttgcctgtcctaccctgaacctgggttccctgggccatgtaacacccaggcagctctgatgcccctgggt

SEQ ID NO: 1962 - DNA, 388 bp, Homo sapiens
  misc_feature 14: n = A,T,C or G
accttttaaataantataagggatggcaaagtttttccctttaaaaatactcactttatgcttataaataggttaatgggctgataaaaggttttgtcaaacattgcaagtattcggtgctatatataaaggaggaaaaactagttttactttcagaatgatttaaacaagatttttaaaaacaagatacatgcaagcgaacagcagggttagtgataggctgcaattgtgtcgaacatcagattttttgttaagaggagcaaatgactcaatctgatttagatggaagtttctactgtatagaaatcaccattaatcaccaacattaataattctgatccatttaaaatgaattctggctcaaggagaatttgtaactttagtaggt

SEQ ID NO: 1963 - DNA, 194 bp, Homo sapiens
  misc_feature 12, 13: n = A,T,C or G
actatagggccnntacgggccctatttcaaagatttttaggggaattaattctaggacgatgggcatgaaactgtggtttgctccacagatttcagagcattgaccgtagtatacccccggtcgtgtagcggtgaaagtggtttggtttagacgtccgggaattgcatctgtttttaagcctaatgtggggaca

SEQ ID NO: 1964 - DNA, 158 bp, Homo sapiens
accccgtggaccttcggccaagggaccaaggtggaaatcaaacgaactgtggctgcaccatctgtcttcatcttcccgccatctgatgagcagttgaaatctggaactgcctctgttgtgtgcctgctgaataacttctatcccagagaggccaaagt

SEQ ID NO: 1965 - DNA, 164 bp, Homo sapiens
ttcaaattgtcttctccacgaggtggaatgaagaaaaagaccacccattttgtagaaggtggagatgctggcaacagggaggaccagatcaacaggcttattagaagaatgaactaaggtgtctaccatgattatttttctaagctggttggttaataaacagt

SEQ ID NO: 1966 - DNA, 93 bp, Homo sapiens
caggcacccatccctactgacacggtctccctggggaccctgtcagcatgtccatgggacttggtcctgatgttggaccgtaagactccaggg

SEQ ID NO: 1967 - DNA, 345 bp, Homo sapiens
  misc_feature 18, 192, 193, 214, 215, 238, 307, 308, 315: n = A,T,C or G
acggaccatgtgctatcntataaatcgaatggcttaaactaatttgctatgatcctctaacaccgaaatttcccataaacttaagtgcctacacttaggacttttgaactttcagtcatctttttcgtggtgtctcactgaacgatgtgttagaacatgtgttccatttggagttttgggcctgtgcacggnnaaccccaattaccaatttagnntgaggctggattcgattgctcanttcacctgccacgttctctccaaggagtggggtctacgtgacctttagtcctctacctcagagccccgnntcatttntgaccaccccgttctgtgtcctcactcttg

SEQ ID NO: 1968 - DNA, 507 bp, Homo sapiens
  misc_feature 378, 458, 496: n = A,T,C or G
ctcaggaggcagcgctctcgggacgtctccaccatggcctgggctctgctattcctcaccctcctcactcagggcacagggtcctgggcccagtctgccctgactcagcctgcctccgtgtctgggtctcctggacagtcgatcaccatctcctgcactggaaccaccagtgacgttggtgcttatgagtatgtctcctggtacctgcccgggcggccgcccgggcaggtactcaataagtggtattgagtaactagtaatactcattggaacttaaaacatcatcttttatccaaaaatttcaaagggcaatataggaaagtattacaaattttacataaaaagaagatgaaacatgagaaaaaacaaagttatttncctgcaaaagcagatcaaatagtgagacaaggaactttgacttctagtccctttaagcaggacgtaactgctagacacantctgaatgtctagatatatttataactaaacttacaangatcaaaaaaa

SEQ ID NO: 1969 - DNA, 258 bp, Homo sapiens
  misc_feature 15: n = A,T,C or G
acttcttgtcaaatnccttcttgatatgagccgcaatgtccttctctatgttgtatttctccagcgcctgagtagcgcactccaccgagtcctgttgcatctcttccgacatgtccgcatttttgatcacggcctttcggtcgcacatggttacctagtgggcaaggccgtggagaagggggctggccgactgcaacggtctcctgggggaggtgctagcacagctcaggcccggctagagctaccgtcgctaccgaa

SEQ ID NO: 1970 - DNA, 256 bp, Homo sapiens
  misc_feature 14, 15: n = A,T,C or G
ctgaagtggcagcnncatcagggattgcttcctcctggtatgaccatagatttgtttcgaggcaaggcagctgtcaaagatgtggaagaagaaaagtttcctacacaactgagcaggcatattaagtttggtcagaaatcacatgtggagtgtgctcgattttctccagatggtcagtatttggtcactgggtctgttgatggattcattgaagtatggaactttactactggaaaaatcagaaaggatcttaagt

SEQ ID NO: 1971 - DNA, 373 bp, Homo sapiens
acaacatcgatgaaattcagacatacaatgtaaagttgaaataatcccaaattattttacattatttatgtatactttacaaataacacaaatatggaaatgttttcttggaaagctgttggaactgtaagcactgcaacgtatgaaagaaacatatttagcaataaaaaatttaataatatcctacaactgaattagttgcatatttataccattcaaaatcttgattttaacctcattcactcctttgaaaaatacattcctcttttgttcttttaaatgcaaaattagtggcagttgcagcaaaaacgccgaaattctataagaaaaaaactgatttaccccaaacatatcattcagcacaaactgcggt

SEQ ID NO: 1972 - DNA, 321 bp, Homo sapiens
accgaacacaggaaagaagagtgggaaattgaaggcctcctataaacgggattgttttagtgttggcagtaatgttgatatagatttttctggaccaaccatctatggctgggctgtgttggccttcgaagggtggcttgctggctatcagatgagttttgacacagccaaatccaaactgtcacagaataatttcgccctgggttacaaggctgcggacttccagctgcacacacatgtgtgagtgtttataatttattccttagtatcagtgcagttgcccaaaatattgtagccattagcatgctgagaagtgatggt

SEQ ID NO: 1973 - DNA, 506 bp, Homo sapiens
acatcttccaacagtgtgaggctcctatggaaggtttccagctttgaagcaatactctgctttcacgttcctgtgtcagaccaggctacccagtcgagtcctcttgtggagcccacagtcctcatggagctaacttctcaaatgttttccataatactgtttgcgctcatttgcttgccttgcgcacctgctctcttacacacatctggaaaacctccggctctctgtggtggaatacccttctaataaaagggtaaccagaacggcccactctcttttacggaaaaatccctaggctttggagatccgcacttacattagagttatgggaatatacacatattaatgtggctccctttttcttgtgggggaataaaagaggactcctcctcattccctttaacatgggggaaaaactgacattaaaagatgagactaaatctttatcttgaattttacacaactacttacgacaagggagatgtttagacctgttgtgtaatact

SEQ ID NO: 1974 - DNA, 346 bp, Homo sapiens
acacagtcgtgtccgcggcggtcaaatacgtcattgtcagggagatctgggtcttggacgtgtcgactgatatggtgactcgactcttgagggacgggttgtagttggtgctccacgatgattgatttccccaatccactccagtcccttccctggggactgccggatccaggcccaccaataattactgaaggacccaccagagacaccgcaggtgagagacagggtctccgaaggcttcaacagtcctgcgccccactgttgcagttacacctgggacaggacccatctgggagctgccaccaggaggaggaagaaccacaggtgtttcatgttcttgtgcagg

SEQ ID NO: 1975 - DNA, 285 bp, Homo sapiens
  misc_feature 86, 87: n = A,T,C or G
acaatttgtggatgtcattgaatctagaggactttcccctttttatatttgtattaactttaacttattaaaaaaaaaaaagaaanngaacaaacaatttaaaaaaaaaaaaaagcaaccaaccccaacaacaaaaaagaatgttttggtattggagaagggatggtcagttagcctgtctgtcacacgacggaatggatactgggcccggggaccactttcatactcacgtcttcatccttggatacccaggggagggcgaaccgttttcgctcgtgtgtctgt

SEQ ID NO: 1976 - DNA, 362 bp, Homo sapiens
acgaagggctgaggcaaaactgttttttaagttggtagatatgctcatgagcaaaggttccctgcatgtaatcatagccattccagctgtcaagttacgcatcatgtgatgagctgctattcgcattcgagattcctccgaatccagggcaaaatccttcctgactatttgctcacaaatagtcatggcaatcttaattgatcgatccaccacaggatggaccagctcctggacagcccgttcaattgcctgacgcacacactgcttcaactgtggatgggcctgaaacaagggaattgttggatttagagtaatgtgtggtgccaagcccgcaagggaatagacattgatgtcgtggtagc

SEQ ID NO: 1977 - DNA, 105 bp, Homo sapiens
  misc_feature 13, 14, 36, 37, 39, 54, 73, 95, 96: n = A,T,C or G
acaagctttttcnncttttttttttttttttttcgnngntttgtttttcctgtntaaaaaaggaccccaaatntaaaggtagggaaagggacaannagggaacat

SEQ ID NO: 1978 - DNA, 257 bp, Homo sapiens; identical to SEQ ID NO: 1118

SEQ ID NO: 1979 - DNA, 383 bp, Homo sapiens
  misc_feature 16, 17: n = A,T,C or G
actacaagaacatcgnnctgggcttcaagacacccaaggaggtgcggggaacctcagaagaaagaaggggaacctggcgttcctgcacgtgtgcccacgacgagttgccctgcctgcatctaagtggcttctggggctgctgggaattgtagttgcttccctgaggccacgcccctggctcttttaaggaaccgcccgcccaaggctcactcctttatctttcctatcctttcaggctattgagggcacctacattgacaagaaatgccccttcactggtaatgtgtccattcgagggcggatcctctctggcgtggtgaccaagatgaagatgcagaggaccattgtcatccgccgagactatctgcactacatccgcaagt

SEQ ID NO: 1980 - DNA, 125 bp, Homo sapiens
acaactaccgccatggtggccgccaggggcagataatctataactggcagggtgcccagtctacccaggatgaggtcgctgcatctgccatcctgactgctcagctggatgaggagctgggaggt

SEQ ID NO: 1981 - DNA, 233 bp, Homo sapiens
acatgacaaggtgcggctccctaggcccctcccctcttcaaggggtctacatggcaactgtgaggaggggagattcagtgtggtgggggactgagtgtggcagggactccccagcagtgagggtctctctcttcctcttgtgctcttgctggggctggtggtccaggggtcttactccttggaggccatgtgggccatgaggtccaccaccctgttgctgtagccaaattcgt

SEQ ID NO: 1982 - DNA, 292 bp, Homo sapiens
actctttagcattaaattacatcgtgcatatacaactacacccatttagatttgccttggaatataatttcaaggccttaaatattaaaaataattttataactatttcatagtttaattggctcttaaatagttttgctagggaggaaacattttgtgttctttaagaaattgatatgtgtaaatgtgttcacttaaatcttgagaaaacctaaggatgaagtctgttgttttgtttttcctaaaaaaggaaaaaagaacctacttttataagccttctctgtttagaagt

SEQ ID NO: 1983 - DNA, 375 bp, Homo sapiens
acaggtatgggacgggaaagccagaggtaggaaggctcagaaggagacagatggctctaaaagagttttccagtgtgtattctgaggaatactagtgttctggagatgttacttagtgtttcaagaaaaggagaattttggctgggcgcggtgactcacgcctgtaatcccagcacttttggaggctgaggtgggtggatcacttgaggtcaggagttcgagaccagcccagccaacatggtgaaatcctgtaactaaaaatagaaaatttagctgggtgtggtggtgtgtgcctataatttcagctacttgggaggatgacacatgagacttgcttgggcccagaaggcagaggttttagtgagttgagatggt

SEQ ID NO: 1984 - DNA, 234 bp, Homo sapiens
acttttcacacaaacagaattttagaaaagcttaaggtcagggagtgctagagagtttctgtatggcaggcaagaattcttccttttgaacaagaccgaaaaacctcaggacaaagagaaagtatatcttttaaaaactgatttcatagtaatgtttctacatattttgaagcacctttatgtatttagagcatatcaaattaattcatttctttccctgttaataaaaaaagt

SEQ ID NO: 1985 - DNA, 444 bp, Homo sapiens
acatgtgaagattttttggcagcttagcgtggaaaccattgatcaccctgctctcatttctacctgttctgtgttggcaagggagagtgcccaaatgagcaagatatcgcagcaaaacagcactccaggggtgaacggaattagtgttatccatacccaggcacatgccagcggcttacagcaggttcctcagctggtgcctgctggccctgggggaggaggcaaagctgtggctcccagcaagcagagcaaaaagagttcgcccatggatcgaaacagtgacgagtatcggcaacgccgagagaggaacaacatggctgtgaaaaagagccggttgaaaagcaagcagaaagcacaagacacactgcagagagtcaatcagctcaaagaagagaatgaacggttggaagcaaaaatcaaattgctgaccaaggaattaagtgt

SEQ ID NO: 1986 - DNA, 264 bp, Homo sapiens
aggtgattccctcgcctttcaagcacgcggacatcgtcaccaccactactcacaagactcttcgaggggccaggtcagggctcatcttctaccggaaaggggtgaaggctgtggaccccaagactggccgggagatcccttacacatttgaggaccgaatcaactttgccgtgttcccatccctgcaggggggcccccacaatcatgccattgctgcagtagctgtggccctaaagcaggcctgcacccccatgttccgggagt

SEQ ID NO: 1987 - DNA, 242 bp, Homo sapiens
  misc_feature 14, 15: n = A,T,C or G
actcaagggaaagnngctcagtttgccagcataagtgccaaagaccatcgccagcatctgtccttcagggtgctcggacagaattcttaccacagcaaaggcataagatgcttgatacggaaaatcagaaacttaactcttttgttgcagatagtcatcagtggctctgtaaaaacgcagaggaaaagagccagaaggtttctgtttaatgcatcttgccttatctttttttattactgtgt

SEQ ID NO: 1988 - DNA, 282 bp, Homo sapiens
  misc_feature 14, 15: n = A,T,C or G
actggcctcaaaanntcaattggaaaagttccatcttttttcttctagaaaagtttataaaagcctggtattatttcttaaatatttggaataacttcagtgaagccatctgttcctagagttttctttctaagcaagtttttgaatactccactcaggtattgtttgcagttgtgacaaggcacaaccaatctctagtatgaccttgtttccagggcttttactgatggcatgttcaccaacccactggcacttcctaagttctaatcatttctcctttgt

SEQ ID NO: 1989 - DNA, 241 bp, Homo sapiens
acagagatggagaacgaatttgtcctcatcaagaaggatgtggatgaagcttacatgaacaaggtagagctggagtctcgcctggaagggctgaccgacgagatcaacttcctcaggcagctatatgaagaggagatccgggagctgcagtcccagatctcggacacatctgtggtgctgtccatggacaacagccgctccctggacatggacagcatcattgctgaggtcaaggcacagt

SEQ ID NO: 1990 - DNA, 502 bp, Homo sapiens
  misc_feature 365: n = A,T,C or G
acaatgaaattactgcatgcagcagtgtagaaaaattttactttttaaaagaattataaaaccatagctttataaatcagtggaaagtggcttacagagagaactatcagatgtgtttacatcacatcttattcactttttttaacagctctaatgctttggcattgctatgttcatatttatgtattccttatttatagctctgatagctttaattttctaagcagtctgtctatcagatgtgcacatctgctgtgccaggttgaagtatagtggaacccatcagtagtaatgtgtagtagttatgacttgttgacatttccattataaactttaattttgaattgtttatgcattataactgnggatttatattgtattgggctgaaagttgacaggatttcagccaccacttgtgaattttttatttagattcattatgtatatcagaatcttgttttttgaaataagagcatggaaaacatttcttgtaatctactct

SEQ ID NO: 1991 - DNA, 276 bp, Homo sapiens
acatttccccgctgataacagcaccatcttccttcgacccccagaccaagggatcaaagctactgctcaattgagtttgacatcagctaccgacttttaaggaatctagaacaaagttctggagccaggccagaagtggtaaaagattcagttagccccttcctctgtgctgtgctgacagggagggagccagtgactggacaatctatgaccccaagtttgtggaacgtggggcttcagctgagggtggggtagtgtgatttcagcagtgtctgt

SEQ ID NO: 1992 - DNA, 537 bp, Homo sapiens
  misc_feature 383, 465, 516: n = A,T,C or G
acgactatcttcagcttactactctggatacagttagctgccttcgaatagtgctgtccatagctagtggtcttgcacatttgtacatagagatatttgggacccaagggaaaccagccattgcccatcgagatttaaagagcaaaaatattctggttaagaagaatggacagtgttgcatagcagatttgggcctggcagtcatgcattcccagagcaccaatcagcttgatgtggggaacaatccccgtgtgggcaccaagcgctacatggcccccgaagttctagatgaaaccatccaggtggattgtttcgattcttataaaagggtcgatatttgggcctttggacttgttttgtgggaagtggccaggcggatggtnagcaatggtatagtggaggattacaagccaccgttctacgatgtgggttcccaatgacccaagttttgaagatatgaggaangtagtctgtgtggatcaacaaaggccaaacatacccaacagatggttctcngacccgacatttaacctctct

SEQ ID NO: 1993 - DNA, 372 bp, Homo sapiens
  misc_feature 15: n = A,T,C or G
acaaaatgagaccangggaaatataaattagtggggcaggtcgggctccagtgggtggcaaagcagagaacatctatccagttagcctatgaggcttgaccctcagagttgctgtccttgggctggacttgaccacctgtaacttaagataaaacagtcccacccttaaggtcatcaaatgaaagacacaaggacagcatagcagaggcctagctggcttgtcagaaaaatgcacgggagatttcagttggctaaaacctcaatatgagccactgcatggccaggctgtgcaaaggagtggggctccattaatagtgcacggtgtggccccactgaggaggagagagtcctcccgcacacagcactggctgt

SEQ ID NO: 1994 - DNA, 82 bp, Homo sapiens
caggtggccaactcagcttttgtggagcgagtgcggaaacggggcttcgaggtggtatatatgaccgagcccattgacgagt

SEQ ID NO: 1995 - DNA, 300 bp, Homo sapiens
accgcggccgttaaacatgtgtcactgggcaggcggtgcctctaatactggtgatgctagaggtgatgtttttggtaaacaggcggggtaagatttgccgagttccttttactttttttaacctttccttatgagcatgcctgtgttgggttgacagtgagggtaataatgacttgttggttgattgtagatattgggctgttaattgtcagttcagtgttttaatctgacgcaggcttatgcggaggagaatgttttcatgttacttatactaacattagttcttctatagggtgatag

SEQ ID NO: 1996 - DNA, 342 bp, Homo sapiens
ttttaacaggacatcatttaattgcctctagggtcctcctgggagagggactgcggggcctttggcagagctctggctgatggaaccaacagaggtgcccatcagccagtgccaggcaggatggcggccccaatgcttggctgggggcagccagcatttggggctgttgcttaagacaatttctgagactaatgggtaaggaatgttgcctttagatggaggagaggggactacatttagagaggagggaggagaagtggcctgcattgggggagggactctaaggttaggttaggaatgacagggagttggtcaaaaggtccttcatggccaggtgaaggc

SEQ ID NO: 1997 - DNA, 174 bp, Homo sapiens
  misc_feature 8, 10, 11: n = A,T,C or G
tttttttntnntttttgttttgatagttatgtcttttaatatgtattagaagaatacataattagcacacatcaaacctgtgatttcacagatatcactacttgggatgaaaatgatataggataacaatgttagacctcagatcaacctcaagaaaaatactgagtaaatagt

SEQ ID NO: 1998 - DNA, 351 bp, Homo sapiens
acttcatttgcctaatttttgccattctcataatgtggcaattgttcaattttgcatttcttccattttatttttttgcatctctgcttttcttttggttagctttgccagttctgcctattatattaatctcccagaatcagcttttagttttgttaaatctctgacatgtttcgttgattcctgctttcatcttaaacatttcttcgttgttaatttgtgtttgctataaaataagcaacatcttaaatgcttgatttgctttcgatgtttattctgtaataagatatttaaagatataattttttccctaaatgctttattagacttttctcataagttttgactggt

SEQ ID NO: 1999 - DNA, 411 bp, Homo sapiens
  misc_feature 14: n = A,T,C or G
gatcctttaaaganacctaaacatttcatagacttttgcacaatggcagaatgcagttaagtggtttaagtggtgttagctttgagggcaaggcaaagtgaggaagggctggtgcagggaaagcaagaaggctggagggatccagcgtatcttgccagtaaccagtgaggtgtatcagtaaggtgggattatgggggtagatagaaaaggagttgaatcatcagagtaaactgccagttgcaaatttgataggatagttagtgaggattattaacctctgagcagtgatatagcataataaagccccgggcattattattattatttcttttgttacatctattacaagtttagaaaaaacaaagcaattgtcaaaaaaagttagaactattacaacccctgtttcctggt

SEQ ID NO: 2000 - DNA, 107 bp, Homo sapiens
  misc_feature 17: n = A,T,C or G
acgtagtctaggccatntgtgttggagattgagactagtagggctaggcccaccgctgcttcgcaggcggcaaagactagtatggcaataggcacaatattggctaa

SEQ ID NO: 2001 - DNA, 354 bp, Homo sapiens
cttggttgccaaacagatttgcagatcaaggagaacccaggagtttcaaagaagcgctagtaaggtctctgagatccttgcactagctacatcctcagggtaggaggaagatggcttccagaagcatgcggctgctcctattgctgagctgcctggccaaaacaggagtcctgggtgatatcatcatgagacccagctgtgctcctggatggttttaccacaagtccaattgctatggttacttcaggaagctgaggaactggtctgatgccgagctcgagtgtcagtcttacggaaacggagcccacctggcatctatcctgagtttaaaggaagccagcaccatagcagagt

SEQ ID NO: 2002 - DNA, 319 bp, Homo sapiens
cgtgaaacttaacactttataaggtaaaaatgaggtttccaagatttaataatctgatcaagttcttgttatttccaaatagaatggactcggtctgttaagggctaaggagaagaggaagataaggttaaaagttgttaatgaccaaacattctaaaagaaatgcaaaaaaaaagtttattttcaagccttcgaactatttaaggaaagcaaaatcatttcctaaatgcatatcatttgtgagaatttctcattaatatcctgaatcattcattttagctaaggcttcatgttgactcgatatgtcatctaggaaagt

SEQ ID NO: 2003 - DNA, 333 bp, Homo sapiens
  misc_feature 20, 310: n = A,T,C or G
acagattgaaatttagttgnttcattggctgtctgaggaggtgtggacttttatatatagatctacataaaaactgctacatgacaaaaaccacacctaaagaaattttaagaatttggcacagttactcactttgtgtaatctgaaatctagctgctgaatacgctgaagtaaatccttgttcactgaagtctttcaattgagctggttgaatactttgaaaaatgctcagttctaactaatgaaatggatttcccagtaggggtttctgcatatcacctgtatagtagttatatgcatatgtttctgngcatgttctctacacaattgtaa

SEQ ID NO: 2004 - DNA, 423 bp, Homo sapiens
gggagctttgtctataagggtggaaaaatctacaaggttccttccactgaagcagaagccctggcatctagcctaatgggattgtttgaaaaacgtcgcttcaggaaattcctagtgtatgttgccaacttcgatgaaaaagatccaagaacttttgaaggcattgatcctaagaagaccacaatgcgagatgtgtataagaaatttgatttgggtcaagacgttatagattttactggtcatgctcttgcactttacagaactgatgattacttagatcaaccgtgttatgaaaccattaatagaattaaactttacagtgaatctttggcaagatatggcaaaagcccatacctttatccactctatggccttggagaactgccccaaggatttgcaaggctaagtgctatttatggaggt

SEQ ID NO: 2005 - DNA, 251 bp, Homo sapiens
actccttctgtgtatttcaggtcgcaggaattcaaccattccttgatggggtcaagagaggctacaggaatggcgttgatcatggtcactttcttgctgtagtccttgtagacgattaccatatcaaagttcttcaggtgaaactggacccgctcaaagtggatcagctctacctcatccaatgtcaccacaaaaggtggccattccgtagcatttaccagcgcactactagtgggctgaaggaggcaggt

SEQ ID NO: 2006 - DNA, 402 bp, Homo sapiens
  misc_feature 12, 13, 15: n = A,T,C or G
acttatctgctnnancacagtaaaaactgagaatttagcagaattatttggaaatggctggcaaccactaaatattggttaatgaatgaatcagttaatatggaatgatgctgtgttggcacaataaaggagtagctctgaacacagagggactttttcgaaatagtgagatatatgaggactggaataatacaagaagttttcctggaggaaggatatatgggatttggagaggcagaggggagggagggctgggatatgatccctggtgtagacacagcatgagcaaaggcatggaggtggtgtggtagagagttgtcatgtgttccagggacaaggaggagactggcttagctggagtgaatgttggggatagtgaaagtttagatatggaggaagtgt

SEQ ID NO: 2007 - DNA, 441 bp, Homo sapiens
  misc_feature 10, 11, 365: n = A,T,C or G
acgtgtgtannttttgttcagtgacttcttcagtgtctcagccagctgagcaaataaagacactacataggcatagttcatgttcaaagaatgagagtaatataaactaattaatattcacactacctcttctaactggttaagtatcattatctcaatttggcagatagaaaaaagaggtagaaagattaagtgacttgcttacagctacagagagaatatttgtcaccagattatcactccagaaagtctagcactttgttcagacaaacagaccacaccttattaggaagatataaaacgcatgataattacacttgggaaaacaatacaattaaggaatggggaacaaaaaggtagtttanggggatataaaactatgaataagtagcttaaaaattcaatcaataaagttgtgttacaacacctgggggaacagca

SEQ ID NO: 2008 - DNA, 92 bp, Homo sapiens
  misc_feature 2, 21: n = A,T,C or G
cnaggtacaaagacaaagaancaaactacattggcatttaagccaatcaaaaaaggaaagaagagaaatccctggtctgattcagaatcaga

SEQ ID NO: 2009 - DNA, 157 bp, Homo sapiens
  misc_feature 104, 115, 140: n = A,T,C or G
acgtgccaagcatcctcgtgcgaccgcgagagcccggggagcgggggcttgccggccgtcgcactcatttacccggggacagggagaggctcttctgcgtgtantggttgtgcanagcctcatgcatcacggagcatganaagacgttcccctgctg

SEQ ID NO: 2010 - DNA, 183 bp, Homo sapiens
acaaatttggtgacagaaaagacttcagtatatgctggcatcttagaagcagttctcaaagagcttagttttattttcttgaattttaagaatgcctaagatccttcttcatcctcgatcttgggagccaagtagtattttaagtgtcccatatccgcaattttatactctacaacaaggggt

SEQ ID NO: 2011 - DNA, 464 bp, Homo sapiens
actttgtgcaatattttaaacatccatcattctgtcagcaaaatgattgtcacaggaagtatagggcacacgtttctctattcagtgagtgacagtgagctacaaaacactggaaagaactgaaactgaggaaggaacttgtaaaaagaacttcaaaattaccaagaagaaggctgtcccagaagaaatatctctttagtctaatcagactttctgaaacttatgtgtaacttaggctgtagatggatggatttcccatattcataattttacaaataatcactcaatattagattaattaatacagtaacatatttggcaagggcgactcaggaagaaaaatcagttactcattacattctctcagaagcatcttttcgtagcatgatcattttgactaaaaaaaaacagttaactatccacaagcatcataactagcaattaattctacatgaaatatctgt

SEQ ID NO: 2012 - DNA, 354 bp, Homo sapiens
acactatccattagagtggaaaggggccaagaggattaataagtgccaccaagtttctaaaactgcagaatcagaggcattgtgcatgctgacaatggtttaaagggtctctcaattttactttaatcccccatttaacctttgtttctttcaaaaaatcaactgaaagcggttaactgaatataaatctattttacagcatttactacgttaatttaaaaatcaacaagctgtaaaatacttacattattcacacatatatagacggaatcatccagaacataatcaactgccaaccccccttaaaaaaaatcaacaaatcagtttttatttgcatggccaattatcatttgt

SEQ ID NO: 2013 - DNA, 508 bp, Homo sapiens
acccattaaactgctaaaaaacaaattgagtggtgagaatacaacagaagtccaatttagattctgagtgttgtcaccatgtgattacaatcacacagacacttccaagcttatagctggagctcctggaagctatttcatactctggtgcaagggccaaaaaaaacacaacacaagaaggaataagtcctgaattattggcttcatcacatccaccttctccaccccaaaatggcacaaaagaaacagttaccacaccctgcagaccttttggtgtaaaagagatgatgatgaactggggtgggaacaggtcatgaagatctgtctaaaaaagtcccattcaggtgagtttgtacatacatctcctacaataggaagtaatgtagaagagatagtgattaataatacacgtttcctaatgtgggatattggtggccaagaatctcttcgttcttcctggaacacttactatactaacacagagtttgtaatagttgttgtggacagt

SEQ ID NO: 2014 - DNA, 381 bp, Homo sapiens
acaaaccagttttattagggaactgccccaggtgcacctctggttcatgctcttgtcacacctgtttctcagatcagcccaggctcagaggcaagttactagctaagcaaagaggaaaactgttctgcaaaatagcaactgtcagcttaaggcattactaacattgcagaaggaagcaagatttactagggacatctggatagcccaggacaatgacttctgggaacaggaagctccctagggccagatcgtgctgccatccaacttgggagatgacattatcgtgctgggatggtgggtaactccttcaaaccaatccatgtcacagaacactgtctattccttgagcttttggatttagaaattagttatataaaaagt

SEQ ID NO: 2015 - DNA, 329 bp, Homo sapiens; identical to SEQ ID NO: 1146

SEQ ID NO: 2016 - DNA, 391 bp, Homo sapiens
acactttgctgctacaaactacatcttgatgggattaagaggctacattgattcttgggtttattgcaccaacaatccatctctgacctacccatggctgcatctgaaacaaggtaaactccaagaagaaatgaaaacagtgggtccctaaagcactcttcccaacaagcaattcttacatgttttatgtcaaacagtcactgctaaagccactggagctgaagatggcacaatgtggctttctttgctttaccttgtctaaaaagcaaactgtgacctggaatccaaagtctgtattctgattgttgtctcagaatagcaaaatatgttttctccagtttggggagctcatgcttaaacttggaagcagtttcctactggaatattatgt

SEQ ID NO: 2017 - DNA, 476 bp, Homo sapiens
acatctccactgagttcaaccgttatggcatctccaatgagaagcctgaggtcaagattggggtttctgtgaagcagcagtttaccgaggaagaaatatacaaagacagggatagccagatcacagccattgagaagacttttgaggatgcccagaaatcaatctcacagcattacagcaaaccccgagtcacaccggtggaggtcatgcctgtcttcccagactttaagatgtggatcaatccatgtgctcaggtgatctttgactcagacccagcccccaaggacacgagtggtgcagctgcgttggagatgatgtctcaggccatgattaggggcatgatggatgaggaagggaaccagtttgtggcctatttcctgcctgtagaagagacgttgaagaaacgaaagcgggaccaggaggaggagatggactatgcaccagatgatgtgtatgactacaaaattgctcggagt

SEQ ID NO: 2018 - DNA, 265 bp, Homo sapiens
  misc_feature 4, 8: n = A,T,C or G
taanctcntcattctacaagcactgaggatatgaagcttaaaaggtgaaaacttgaatacccttagaaaaggggaacagtctgaggcaaaagttgtaggcctgtaaatatatattttattttattttcatcttttttgagacggagttttgctcttgttgcccaggctggagtgcagtggtgtgatctcggctcactgcaacccccacctcccggcttcaagtgattctcgtgcctcagcctcccgagtagctgggattataggt

SEQ ID NO: 2019 - DNA, 276 bp, Homo sapiens
acattccaatatgtttacagctgcaagataatgaggcacactcagtattgcacttcattaaaatttcaggctcaaacttaacctagaagtttaaatgaaattgcatttgtaatttagtaattcttatacaggacaaacattgatatgtttatatacagtgtgatacttattacatttatatgctgtcctaacacaatgttttttttttttttaaataacagtctaggaaataaaccagaatattcctctttttatccccacccgtgatgcaattgt

SEQ ID NO: 2020 - DNA, 406 bp, Homo sapiens
accagtgctggctgcaggtattaagtccaagtttattaactagatatttatttagtattgagagtaatttgtgaatttgttttgtatttataaaatttatacctgaaaaatgttccttaatgttttaaaccttttactgtgtttttattcctctaacttccttaatgatcaatcaaaaaaagtaacaccctccctttcctgacagttctttcagctttacagaactgtattataagtttctatgtataactttttaactgtacaggaccacgttccagtcctcctgggtcaggatctggaacacggtgacgatggcccacagcagggagtcgaagttcttcctgtcaggcacggtgtctccggtgtctgtcttcaggctgaacttgcagccgaaaaggtgcatgcc

SEQ ID NO: 2021 - DNA, 529 bp, Homo sapiens
actattctgtgtcattcagtaaagaggcgaagtattatcagctgagatgttccggtcctggtctgcccctctatactctacacagcagcgtgaatgataaagggctgagagtcctggaagacaattcagctttggataaaatgctgcagaatgtccagatgccctccaaaaaactggacttcattattttgaatgaaacaaattttggtatcagatgatcttgcctcctcattttgataaatccaagagatatcctctactattagatgtgtatgcaggcccatgtagtcaaaaagcagacactgtcttcagactgaactgggccacttaccttgcaagcacagaaaacattatagtagctagctttgatggcagaggaagtggttaccaaggagataagatcatgcatgcaatcaacagaagactgggaacatttgaagttgaagatcaaattgaagcagccagacaattttcaaaaatgggatttgtggacaacaaacgaattgcaatttggggctggtcatatgga

SEQ ID NO: 2022 - DNA, 317 bp, Homo sapiens
  misc_feature 120, 228: n = A,T,C or G
cttttttttttttttttttttttttttggaaagttgaatattttattatttacacatataaagtgagaatgaaaattgggcatggggcaagggcaggaagatgactccagctcagtcggngatgatgagctcgtccaccccccagtcttcatagctcccatctggcaggtaacggcgaatgatgatggggatctttcgggccttgagttccttcatggcaatgagcanaggatctgtctccccctccagctccaccatcacaggggcacacatcgcaatctggagcgctcgggtgcccagcacgcgggctcgctcgt

SEQ ID NO: 2023 - DNA, 218 bp, Homo sapiens
acctaagcagtaagcgtatttaggttaatgcagtttcacttatgttaaatgttgctcttataccacaaatacattgaaaacttcggatgcatgttgagaaacatgcctttctgtaaaactcaaatataggagctgtgtctacgattcaaagtgaaaacatttggcatgtttgttaattctagctttttggtttaatatcctgtaaggcacgtgagtgt

SEQ ID NO: 2024 - DNA, 543 bp, Homo sapiens
acatggctgagcatgcactatttatagttacaaagatacctgccaatttattacaatagaattacacagtgcctgaaaatggtgaaacatctcacacatcatttaaatcaatataatttcaagcaggaaacgttccttatttgaccacaattgcaataattacatgaaaattcttataaaaacatgaatctccttcaagaaattgatgcatattctacgcactacaggttaaggcagtaaaaaaatgtattcctgataactggaggtgttgacaatgtcaattaaagctgtctgactctagtttttcattctccatcatataccaaaagtttgtgaatgatttcatttttaaagtcaacaaagtattagtaactaagaagagttgaagctggaaaaaagtaattgctagggaagggaaaaatgtaaattggattttgcctgaaagttttcaaatcataaacaatagcattatttatgagtctaagccttaaatgtataaaacaaatacatatagttcacttttcttaatttaaaatatactgt

SEQ ID NO: 2025 - DNA, 506 bp, Homo sapiens
  misc_feature 4: n = A,T,C or G
tacnactcctatagggcgaattgggccctctagatgcatgctcgagcggccgcccgggcaggtacactgtcttaatatgaatgggactgcttttctacttgagccatttttaaccaaagcaaaataacctaagtaatacaaagtgttaaaatacagcataaagatacaaaaacagacatactaattctagttaggaatgtaattatgatgttacattttttataatccacaattatgtttagggaatcacacaaacatagatcactgatttgaatgaaatgcataaatttgtagcaaagctttgtagttacaaaaaacaaaaaaattaccaaagaatgcacaaaattaatgtttattccacctttgtgtcatattcctggatccttcaccaatgttacatgaggaaaaaaacaaaagcaaaacaaatgaaaaactgaaatcagaatcactaatattatcaaatagggaaacaaataaattaaaatctagcagccatcagcaagagt

SEQ ID NO: 2026 - DNA, 510 bp, Homo sapiens
  misc_feature 493: n = A,T,C or G
ttttttttaaggggctgtaattatatttattagattaacaaggcagatgtgaattttctcttctataatccagtaagtctgtgtattcgttgactcagacagacaagaagccacaaggaaacaaagaagtaatcatttgttgagagacgttattaactatgatcttccctgaagctaccgggatgggaaaggtcagtgtcttcctttgaaccctgagacaattaggggctcttgaggcctgctgtgcccctgctgccaaggcagcctcaagttcaaggagcagctaatcacccactcctgcattcagcctgtcttgcctgatgagggctacgcaggctgcctcccattggtgtgcactgtttcctttttcagctgctaaatgggctgaacaccatcggcctggggtatccctttttggggaatacatctgtctgtccgaactcctttcccttcaaatggcactgtgataaaatctggtcataccatgctccancactggaagtacctcgg

SEQ ID NO: 2027 - DNA, 306 bp, Homo sapiens
actcaaaatacagtcaccactgcaaaagagatacctgtgcattactctttttttcccctctggctttcagcacggccttctgaggctttaacaagaggtaataaggacttagcaagcagttctcctaaccaatacattaattcacttgaaagtcatacttttaaaaaaatcagtagtgtatatgttgaggaaaaaaagcatgttcactctggaacaaagttggccctctatggctctcagatgcctaatgctctacagttttgtgagagaattgttaactgtaaagctgtaaaggcggttattggt

SEQ ID NO: 2028 - DNA, 484 bp, Homo sapiens
  misc_feature 151, 247, 328, 394: n = A,T,C or G
gctctcttaggaatacagtttctagcattaaacaaataaacaaggggagaaaataaaactcaaggagtgaaaatcaggaggtgtaataaaatgttcctcacattcccccccgctttttttttttttttttgactttgccttggagagccanagcttccgcattttctttactattctttttaaaaaaagtttcactgtgtagagaacatatatgcataaacataggtcaattatatgtctccattanaaaaataataattggaaaacatgttctagaactagttacaaaaataatttaaggtgaaatctctaatatttataaaagtancaaaataaatgcataattaaaatatatttggacataacagacttggaagcagatgatacagacttntttttttcataatcaggttagtgtaagaaattgccatttgaaacaatccattttgtaactgaaccttatgaaatatatgtatttcatggt

SEQ ID NO: 2029 - DNA, 476 bp, Homo sapiens
gcccagcagccaccacagcgcctgcttcctcggccctgaaatcatgcccctaggtctcctgtggctgggcctagccctgttgggggctctgcatgcccaggcccaggactccacctcagacctgatcccagccccacctctgagcaaggtccctctgcagcagaacttccaggacaaccaattccaggggaagtggtatgtggtaggcctggcagggaatgcaattctcagagaagacaaagacccgcaaaagatgtatgccaccatctatgagctgaaagaagacaagagctacaatgtcacctccgtcctgtttaggaaaaagaagtgtgactactggatcaggacttttgttccaggttgccagcccggcgagttcacgctgggcaacattaagagttaccctggattaacgagttacctcgtccgagtggtgagcaccaactacaaccagcatgctatggtgttcttcaaga

SEQ ID NO: 2030 - DNA, 467 bp, Homo sapiens
acttcttttgctaccaaatttttaagaaaagggagaaatccctcataactaaaatcctaaaaaatgataagtgcttcaaggagattaaagtgtcaggtattacaaaagggagagaaaagaaaggaggaagagatagtatgaattcccaggctccctgtggaaaatgaaaaccagttgttttgtagcagcaatgcctaggctgtcgtattttaaaatctgctgttgggtctgcatgtgtctgagagggcaggttttgatatttgttgaaatgacaggactacgaaaggccttaaacctcgaccttgacgaaaaaaaagacaatttgtgaccttgacttttgacagctcatgaattggccttagctggattagtagatcaagggcgccacctcgcgttgacaagcctccttgtaattcttcaaccaagggaatcaagagctcttacctccttgactttagagattcagt

SEQ ID NO: 2031 - DNA, 257 bp, Homo sapiens
actatagggtaaatacgggccctatttcaaagatttttaggggaattaattctaggacgatgggcatgaaactgtggtttgctccacagatttcagagcattgaccgtagtatacccccggtcgcgtagcggtgaaagtggtttggtttagacgtccgggaattgcatctgtttttaagcctaatgtggggacagctcatgagtgcaagacgtcttgtgatgtaattattatacgaatgggggcttcaatcgggagt

SEQ ID NO: 2032 - DNA, 115 bp, Homo sapiens
cagcttcactccatcaaacacggctgggagttcgggagtctccagcatggcattcatcttgatcaatgttacttattcttcccactgcaaatacgaattttccttgaagagttgt

SEQ ID NO: 2033 - DNA, 374 bp, Homo sapiens
acaaacatgctcagaacttgctgggacagtgtgggtgggagaccagggctttgcaattcgtggcatcctttaggataagagggctgctattagattgtgggtaagtagatcttttgccttgcaaattgctgcctgggtgaatgctgcttgttctctcacccctaaccctagtagttcctccactaactttctcactaagtgagaatgagaactgctgtgatagggagagtgaaggagggatatgtggtagagcacttgatttcagttgaatgcctgctggtagcttttccattctgtggagctgccgttcctaataattccaggtttggtagcgtggaggagaactttgatggaaagagaaccttcccttctgt

SEQ ID NO: 2034 - DNA, 265 bp, Homo sapiens
  misc_feature 15, 16: n = A,T,C or G
acttctatttcctcnnggatgagaaagatagtcaaggagaaaacatgtttctgcgctgcgtgagtgagcttgtgattgaaagccgagagttcgatatgattcttgggaaactagagaatgacggaagtagaaagcctggagtcatagataagtttactagtgacacaaagcctattatcaacaaagttgcttctgtggcagaaaataaaggactgtttgaagaggcagcaaagctgtatgaccttgccaagaatgctgacaaggt

SEQ ID NO: 2035 - DNA, 259 bp, Homo sapiens
  misc_feature 15, 16, 17, 168, 190, 212, 238: n = A,T,C or G
accaaatctttgggnnncattggcaaataatttcagtgtggtgtattattaaatagaaaaaaaaaaattttgtttcctaggttgaaggtctaattgatacgtttgacttatggtgaccatttatgcactttcaaatgaatttgctttcaaaataaatgaagagcagcntgtccttctttcctcttttaantgttcagctgtggcatgctcanaggttcctgctggattccagctggancggtgtgatacccttcttttt

SEQ ID NO: 2036 - DNA, 264 bp, Homo sapiens
actcccggaacatgggggtgcaggcctgctttagggccacagctactgcagcaatggcatgattgtgggggcccccctgcagggatgggaacacggcaaagttgattcggtcctcaaatgtgtaagggatctcccggccagtcttggggtccacagccttcacccctttccggtagaagatgagccctgacctggcccctcgaagagtcttgtgagtagtggtggtgacgatgtccgcgtgcttgaaaggcgagggaatcacct

SEQ ID NO: 2037 - DNA, 161 bp, Homo sapiens
actttggcctctctgggatagaagttattcagcaggcacacaacagaggcagttccagatttcaactgctcatcagatggcgggaagatgaagacagatggtgcagccacagttcgtttgatctccaccttggtcccttggccgaacgtccacggaggggt

SEQ ID NO: 2038 - DNA, 224 bp, Homo sapiens
  misc_feature 11, 44, 45, 46, 105, 178, 179, 192: n = A,T,C or G
ctcctgattcntggtgctgctgtctctgtccttctacaggaggnnntaccgctttgcctactacaagctgcttaagaaggcagatgaggggttagcatcgctgantgaggacggaagatcacccatctccatccgccagatggcctatgtttctggtctctccttcggtatcatcagnngtgtcttctctgntatcaatattttggctgatgcacttgggccag

SEQ ID NO: 2039 - DNA, 463 bp, Homo sapiens
  misc_feature 403, 432: n = A,T,C or G
actttggcctctctgggatagaagttattcagcaggcacacaacagaggcagttccagatttcaactgctcatcagatggcgggaagatgaagacagatggtgcagccacagttcgtttgatttccaccttggtcccttggccgaacgtccagggactactgtaactctgttgacagtagtaagttgcataatcttcaggttgcagactggtgattatgagagtgaaatatgtcccagatccactgccactgaaccttgatgggacccctctttgcaaactggatgcaccatagatcaggagcttaggggctttccctgctttctgctgataccaatttaaataggtgctaatgctctgacttgcccggcaagtgatggtgactctgtctcctacagatgcanacagggaggatggagactgggtcatctgnatgtcacatctggcacctcggagccagagta

SEQ ID NO: 2040 - DNA, 558 bp, Homo sapiens
  misc_feature 8, 9, 14, 354, 527: n = A,T,C or G
ctttgggnnctagnttaattttttttttgcaacatatcccactcagaaacattcaggtttgaagccagccctgataatgaaggatgaactagtgtgatttctaatcctcccttttttgatttagttggatgtgcttttaaatgtcctttgcctgcatgaggtggaaaggggacctttttgagttgtcattttgcactttcaaaacttattttcttggaaaacaatatttatagggcttaaagcccattttcatttctaatctaaattatgtgtgcctatctgaaaactttgggctctttcttgtttctttcccaaaattcagaagttaatgggcttttatgtttttctatattntttttatttcaatgatttggcctgtctatgttaggctaaaaaataaccttgtgtatgctaccaacttaaagtgcattattttgtgtcactttttttttcttgtaaaaatgacttggattgaaaatatgtggtagcctttttatttctacattaagttctacctaggatatttncaaggactgccacaaaacccatatgtgcagt

SEQ ID NO: 2041 - DNA, 276 bp, Homo sapiens
  misc_feature 109, 110: n = A,T,C or G
acacaggaggcaaagtgtttcacatcatagacttcacttccaactccttggaatgttcatttctttggcttacaggagagactagacaggaaggccaggcaatgcttanncaactaaaatgaggttgggggtaatgctaacgtcaccctcacagggatggccacggggactgttattcgcaagctggttttctagacctgttagctggaagcatggtgagcaccatttctggacgctcaggccgtgtcgggcttcagtcatctccaccacacaggt

SEQ ID NO: 2042 - DNA, 241 bp, Homo sapiens
ccgcgccgccacaatggtgcgcatgaatgtcctggcagatgctctcaagagtatcaacaatgccgaaaagagaggcaaacgccaggtgcttattaggccgtgctccaaagtcatcgtccggtttctcactgtgatgatgaagcatgtgtggggtgatcagccccagatttgacgtgcaactcaaagacctggaaaaatggcagaataatctgcttccatcccgccagtttggtttcattgt

SEQ ID NO: 2043 - DNA, 539 bp, Homo sapiens
actattctgtgtcattcagtaaagaggcgaagtattatcagctgagatgttccggtcctggtctgcccctctatactctacacagcagcgtgaatgataaagggctgagagtcctggaagacaattcagctttggataaaatgctgcagaatgtccagatgccctccaaaaaactggacttcattattttgaatgaaacaaattttggtatcagatgatcttgcctcctcattttgataaatccaagagatatcctctactattagatgtgtatgcaggcccatgtagtcaaaaagcagacactgtcttcagactgaactgggccacttaccttgcaagcacagaaaacattatagtagctagctttgatggcagaggaagtggttaccaaggagataagatcatgcatgcaatcaacagaagactgggaacatttgaagttgaagatcaaattgaagcagccagacaattttcaaaaatgggatttgtggacaacaaaacgaattgcaatttggggctggtcatatggagggtacctg

SEQ ID NO: 2044 - DNA, 486 bp, Homo sapiens
acactcccagggaagtcagagtaagcctgtttccaccgcagcacagcagtgagcacagctaggcagaattccaacagagcgcaaatcagcatcagagagagagttccagccagactggcttttggctgtatagcagtccgtggtataaagtgaatcatgataaaagtaagaaacataacttcttgttggtatattatttttgtccaactcacactgcagtgaggcaggatttaaggtggcctgtttgacagacaggataatgaaacccaccagggcagacagagcactcagaatgcttccaaccaggctgctatgcaccaaaagcttggttaaccttttctctgtggcgattgatagagagccagagatgataaaaaaaaagggtcctatgaatgggtaagcagagttcaacagtgtagaagtcacttgggtaaaatttggagagaaggaagcagatgccaaaatgatccccaagctcaataccat

SEQ ID NO: 2045 - DNA, 420 bp, Homo sapiens; identical to SEQ ID NO: 1848

SEQ ID NO: 2046 - DNA, 291 bp, Homo sapiens
acatttgttcggcgcaggtgccactgaccacaaagtcatcagtcaccatggggcagccgatgaggtctagagagcaaatgaagggcttaaaggtcttcgggtccaacccggcaatgactggctcagtgtagtaagggccaaaccgtttctcatacaagaggttggccaccatgctcatgagggtataaggtttgatctgccgaccttccttcaactcatacaggttcagccggaacttgaggcgctgggcaactgtctggacgtcagtggcgagcccggccagaccgatgt

SEQ ID NO: 2047 - DNA, 309 bp, Homo sapiens
cccgatccgccagcaccacctgaggatccagaaaccgccccagcgatggaagaggatcaggagctggagagaaaaatatctggattgaagacctcaatggctgaaggcgagaggaagacagccctggaaatggtccaggcagctggaacagatagacactgtgtgacatttgtattgcacgaggaagaccataccctaggaaattctctacgttacatgatcatgaagaacccggaagtggaattttgtggttacactacgacccatccttcagagagcaaaattaatttacgcattcagactcgaggt

SEQ ID NO: 2048 - DNA, 555 bp, Homo sapiens
acattcttctcagcaccttagagcccactgatgcaggcatactgggaacgactaaggactcacccaagctgggtctgctcatggtgcttcttagcatcatcttcatgaatggaaatcggtccagtgaggctgtcatctgggaggtgctgcgcaagttggggctgcgccctgggtatgattgggctctctcagcgcttgctgtccgtgttgtcctttggcaagagaggacggtcctaggattgcatcagtctggtggtctggtggagcgggtggggtgctggactgggtagagggcccagggttctgacctgggtggatgatgggcgaatggtcctgaactctctgctccctctctcagtgtctcttgggcttctatggagcttccctcttgtgctggaaacctcttttccatcttggaaatgcctctgcccacatctgggaagtgccatagccttgagtgaatttatttgtttatttatttttctttttcttctctcaggatacatcattcactctttggggacgtgaagaagctcatcactgatgagtttgtga

SEQ ID NO: 2049 - DNA, 279 bp, Homo sapiens
acacgacaaagtcttcatttcaaaccattcactcagtttccatggtaacattgcgggcttccttggctaccataagtcgcattagttgactgtggaatttctcaatcttctttacatcttgagcttggtctgttttatacaccaaacaaactaaatcatctgttactttaacacacaagttcccatcagaatgcctatatttgagaaccacacgtgccttcatagggtcagcgaggtaaagcttctcggcagcgcggctgagctcctcccaggtctggt

SEQ ID NO: 2050 - DNA, 356 bp, Homo sapiens
  misc_feature 116, 160, 161, 205, 206: n = A,T,C or G
acggtagaactgctattattcatcctatgtgggtaattgaggagtatgctaagattttgcgtagctgggtttggtttaatccacctcaactgcctgctatgatggataagattganagagtgaggagaaggcttacgtttagtgagggagagatttggtnnatgattgagatgggggctagtttttgtcatgtgagaagaagcannccggatgtcagaggggtgccttgggtaacctctgggactcagaagtgaaagggggctattcctagttttattgctatagccattatgattattaatgatgagtattgattggtagtattggttatggttcattgtccggagagtatattg

SEQ ID NO: 2051 - DNA, 101 bp, Homo sapiens
  misc_feature 56, 57, 62, 95: n = A,T,C or G
acctgataaaactttaaccagggaagcattaaacacagtgcagcagcttttgcccnngcttntaagttcctgccggcagcatttatcaatgtaanaactaa

SEQ ID NO: 2052 - DNA, 207 bp, Homo sapiens; identical to SEQ ID NO: 1896

SEQ ID NO: 2053 - DNA, 216 bp, Homo sapiens
  misc_feature 109: n = A,T,C or G
acttctcagaacgtggggatgctgtggccaaggcctccaaggagactcatgtaatggattaccgggccttggtgcatgagcgagatgaggcagcctatggggagctcanggccatggtgctggacctgagggccttctatgctgagctttatcatatcatcagcagcaacctggagaaaattgtcaacccaaagggtgaagaaaagccatctatgt

SEQ ID NO: 2054 - DNA, 373 bp, Homo sapiens
cgcagagggacaaaaatcaaccggaattgaaaactactcaacggccgcagaacggggtcgatccactgccgctggctgccggctgccggcggggagcgagggtggcggtgtcgggtccgggcagcgggaaggcctcggtctcttggttccttcttggagctgctgcggggccgcgggcgggcgggtcggtctcggctgcttcaccgggttattttataaaagaggaagaaaaaaaataaaagtctccggcgggggagacgcggattttttgtaaatttttttggggttttttaaaagatttttttagattttttttggattttttaataataaatgtgtgttccgagcccggagcacacactccgcactctcg

SEQ ID NO: 2055 - DNA, 241 bp, Homo sapiens
acctgcaagaaacctactcaaagcaggtcaccagccaggagccctgacccaggctgcccagcctgtccttgtgtcgtctttttaatttttccttagatggtctgtcctttttgtgatttctgtataggactctttatcttgagctgtggtatttttgttttgtttttgtcttttaaattaagcctcggttgagcccttgtatattaaataaatgcatttttgtccttttttaaaaaaaaaa

SEQ ID NO: 2056 - DNA, 596 bp, Homo sapiens
  misc_feature 492: n = A,T,C or G
cttttctgtattttactatgagattcttaataacccagagcttgcctgcacgctggctaaaacggcttttgatgaggccattgctgaacttgatacactgaatgaagactcatacaaagacagcaccctcatcatgcagttgcttagagacaacctaacactttggacatcagacagtgcaggagaagaatgtgatgcggcagaaggggctgaaaactaaatccatacagggtgtcatccttctttccttcaagaaacctttttacacatctccattccttattccacttggatttcctatagcaaagaaacccattcatgtgtatggaatcaactgtttatagtcttttcacactgcagctttgggaaaacttcattccttgatttgtgtttgtcttggccttcctggtgtgcagtacctgcccgggcggccgcccgggcaggtacttgtgccaggaatataaatcaacacattgcttcctttatcaaagnaagtcttgttatttaaaaaaagtcaactgagccagtatgattagtgatgtaattgattttcattctggcacaagcctctttcattctggacagctcacaaatag

SEQ ID NO: 2057 - DNA, 523 bp, Homo sapiens
actttgcctacggcagcaacctgctgacagagaggatccacctccgaaacccctcggcggcgttcttctgtgtggcccgcctgcaggattttaagcttgactttggcaattcccaaggcaaaacaagtcaaacttggcatggagggatagccaccatttttcagagtcctggcgatgaagtgtggggagtagtatggaaaatgaacaaaagcaatttaaattctctggatgagcaagaaggggttaaaagtggaatgtatgttgtaatagaagttaaagttgcaactcaagaaggaaaagaaataacctgtcgaagttatctgatgacaaattacgaaagtgctcccccatccccacagtataaaaagattatttgcatgggtgcaaaagaaaatggtttgccgctggagtatcaagagaagttaaaagcaatagaaccaaatgactatacaggaaaggtctcagaagaaattgaagacatcatcaaaaagggggaaacacaaactctttagaacataacaga

SEQ ID NO: 2058 - DNA, 183 bp, Homo sapiens
  misc_feature 12, 46, 47, 56, 156, 160, 168: n = A,T,C or G
acatacgtgaanagttaccaccagtcctgccacctttggacagctnnaacaccatncccagcatccagtcagacctagtaaagaaaaccttggattcttaacccaagataggctgtaaatcactagctttttttcctcatgaaaaaaaatagagtnaaanaatatttnctctcttttctatat

SEQ ID NO: 2059 - DNA, 315 bp, Homo sapiens
accaatttttagaaacatattgtcttctcagattgaagtggagggtccagaaatgcaacacccagcattctttaaagaaaataatagctagaatctttctgatacagattccaatatagattccattattcaaagtcctccacaaattactgggaaaatgtaagaggtaacttcacaaaaatcacatattgagtggaataattataactgatatataaataaggatttactaaaaaaaagcctcaaggggtgatattttaaatcaaggttttaaatacaaaaggtgtcttgtgttgcttaatcatacagtttcgt

SEQ ID NO: 2060 - DNA, 218 bp, Homo sapiens
  misc_feature 98, 153, 161, 162, 183: n = A,T,C or G
acttgaatggaaggcggatgaacaccttgcaggccatctggatgatggaccccaaggatgtccgtgagtggcaacatgaggagttctaccgctacgtngcgcaggctcacgacaagccccgctacaccctgcactataagacggacgcaccgntcaacatnngcagcatcttctacgtgcccnacatgaaaccgtccatgtttgatgtgagccgggag

SEQ ID NO: 2061 - DNA, 284 bp, Homo sapiens
acatgtatttaacattttaccagtttctgcttctaaatttaatatagtaattccaaccaaaaaaatagtatctctgtaacattttatctatgtccactgcaagctgcagagtctctgttgccaagatttcttgacacatttaatgttttacctaaaattgtggtcagattgagcaatatcattatcctaaattatgtttaaattatctaaaaatatccaaagcagttttcttggaagaaaaaaaatattactcaaatccaaagcattatcacacatatccttgt

SEQ ID NO: 2062 - DNA, 308 bp, Homo sapiens
acaggtctctgtaaaaagtccttgctgtctcagcagccaatcaacttatagtttatttttttctgggtttttgttttgttttgttttctttctaatcgaggtgtgaaaaagttctaggttcagttgaagttctgatgaagaaacacaattgagattttttcagtgataaaatctgcatatttgtatttcaacaatgtagctaaaacttgatgtaaattcctcctttttttccttttttggcttaatgaatatcatttattcagtatgaaatctttatactatatgttccacgtgttaagaataaatgt

SEQ ID NO: 2063 - DNA, 172 bp, Homo sapiens
  misc_feature 129: n = A,T,C or G
aagtgtgactactggatcaggacttttgttccaggttgccagcccggcgagttcacgctgggcaacattaagagttaccctggattaacgagttacctcgtccgagtggtgagcaccaactacaaccancatgctatggtgttcttcaagaaagtttctcaaaacagggagt

SEQ ID NO: 2064 - DNA, 240 bp, Homo sapiens
acagagtgaggctgagtctacaccttcagtcttcatcatcaggagggatacctaattcttcatctgtccactgggaaggatcaggatacggaaagtgacccagcacctcttctgagtcatgccaaaagcgccagagaatccagaaccacatgagtccgctgaagaactcgctctggaacacctgggatctggtcagctgggggaactgtctataccggggctcaatgtgcacaccaccac

SEQ ID NO: 2065 - DNA, 375 bp, Homo sapiens; identical to SEQ ID NO: 1222

SEQ ID NO: 2066 - DNA, 297 bp, Homo sapiens
  misc_feature 140, 268: n = A,T,C or G
acaaattctgagctgtctaacccctctgaaacggaatctgagcgtaaagacgagctgagtgattgatcattggcaggagaagatgatcgagacagccgacatcagcgtgacagcaggagacgcccaggaggaagaggcanaagtgtttcagggggtcgaggtcgtggtggaccacgtggtggcaaatcctccatcagttctgtgctcaaagatccagacagcaatccatacagcttacttgataatacagaatcagatcagactgcanacactgatgccagcgaatctcatcacagt

SEQ ID NO: 2067 - DNA, 240 bp, Homo sapiens
aaacttgtgagcttactgcagtcagtcacagaggctgttctttttcacacaccccttcatgcccggctttccccatatccacatgcagagggcgagctcataaaactacagggaagcgtgaaatgatggctttggtagctgtttactgggtaaccccactgtgacactgtccttttcatgtgatgtggaaacctacttctgtcctccaaaccatgaaatgtgtcatctagactgcagagt

SEQ ID NO: 2068 - DNA, 419 bp, Homo sapiens
  misc_feature 141: n = A,T,C or G
actggccttggtaaaggaatgacaactcttctgtccagcctaggtgctcagtgcgtgatagccagccggaagatggatgttttgaaagctaccgcagaacaaatttcttctcaaactggaaataaggttcatgcaattcantgtgatgtgagggatcctgatatggttcaaaacactgtgtcagaactgatcaaagttgcaggacatcctaatattgtgataaacaatgcagcagggaattttatttctcctactgaaagactttctcctaatgcttggaaaaccataactgacatagttctaaatggcacagccttcgtgacactagaaattggaaaacaactaattaaagcacagaaaggagcagcatttctttctattactactatctatgctgagactggttcaggttttgtagt

SEQ ID NO: 2069 - DNA, 259 bp, Homo sapiens
acgtgggtgaggggatggaggaaggcgagttttcagaggcccgtgaagatatggctgcccttgagaaggattatgaggaggttggtgtggattctgttgaaggagagggtgaggaagaaggagaggaatactaattatccattccttttggccctgcagcatgtcatgctcccagaatttcagcttcagcttaactgacagacgttaaagctttctggttagattgttttcacttggtgatcatgtcttttccatgtgt

SEQ ID NO: 2070 - DNA, 356 bp, Homo sapiens
acgcacaaactctattcaaaatgagaagttgtttgccaactctcatttcctaggataacacacatcacactgtttaagagtgggggaaagaatagtcatactgttagagcacaatgtttcctgaaaagaaactgatcaaaacgtttgaagcctttttagttgcctcaaagtgtgacagccactcaatactgctcctaacagtctgctttcagataacgtcataaaataaaataactgtgtgaaaagccatggccttcaaaaaactttatttggttatgagccaagctctgataggaaaagcccacctacgaaaaaaaggtgtgggtatttaagctggtctgattcacagagcttgt

SEQ ID NO: 2071 - DNA, 233 bp, Homo sapiens
actagtgttgtaactttccaagtaaaagtatcccctaaaggccacttcctatctgatttttcccagcaaatgaggcaggcaattctaagatcttccacaaaacatctagccatctaaaatggagagatgaatcattctacctatacaaacaagctagctattagagggtggttggggtatgctactcataagatttcagggtgtcttccaactgaaatctcaatgttctcagt

SEQ ID NO: 2072 - DNA, 341 bp, Homo sapiens
acttggcacttcagtttcaaacacgtagtcctttaaaacttgatccgatagctttaatgcggccggtcctctctcagtcaggaaaattgcacagaccgacagtcgtgaggatggcagagctgctgcattcccccacacggggatttctgtgtctgcttggcgacctccctgcgtgcacggcctaggaggtgcacgggccaccatagtcacactggcactgaaaagaaagcgttgccctggtgattctttcccccccgtttgtaatgttaactgatcaggaagcgcagtttgggtgggatgccgaatcgtcgtgctgacattgagtcacggatgaggaaggt

SEQ ID NO: 2073 - DNA, 517 bp, Homo sapiens
  misc_feature 470: n = A,T,C or G
acaaataaagtgcatttttaaatagctctatttaactttggtggatgaagcttcaaactttatattaaggcacctggaattctcccccccttctttttcaaacaccaggaaaatgcattcacaaaatttatagttacacggacagaattttagtttatctaatgtaattttagcccatttaggtcaaacataaactcaattttcaaagtaacattgtttggaaaacattttcaacagactaattttacagaacattttttttctgtagactaattcatgaacgaagatcaatgaccaatattagtgttacttactctgtcattagcaatttcaaacagtatgatgattcatatactgagcttttgaaaaatcccacaagtttgagaaatagttacacagtatttttgtaaggaattttttgtctaatcttgtgtcaagttgatgtcactaatataccaatcaattaagtncataatctctgataaactatggttgacaaatcacatgaagtacctgc

SEQ ID NO: 2074 - DNA, 298 bp, Homo sapiens
acttcatataagtggaatcatatagtatttgtccttttctgtctggcttatttcacatataatgtcttccaggttcatcatattgtagcacatgtcagaatttcattcctttttaaggctgaataatattccattatgtgtataccacattttgtttatccattcatccatcaatagacatttgggtatttccaggacaatatattcttaatttaatcccacattttaagacttacaggtaatttaaattcaattcaacttactgagtatttactaagggtaactcactatgggaagt

SEQ ID NO: 2075 - DNA, 483 bp, Homo sapiens
acaacagcggtggtggccctgatacgagagaagcagttgattgtagccaacgcaggagactctcgctgtgtggtatctgaggctggcaaagctttagacatgtcctatgatcacaaaccagaggatgaagtagaactagcacgcatcaagaatgctggtggcaaggtcaccatggatgggcgagtcaacgggggcctcaacctctccagagccattggggaccacttctacaagagaaacaagaacctgccacctgaggaacagatgatttcagcccttcctgacatcaaggtgctgactctcactgacgaccatgaattcatggtcattgcctgtgatggcatctggaatgtgatgagcagccaggaagttgtagatttcattcaatcaaagatcagccagcgtgatgaaaatggggagcttcggttattgtcatccattgtggaagagctgctggatcagtgcctggcaccagacacttct

SEQ ID NO: 2076 - DNA, 276 bp, Homo sapiens
acctctcaacattaccaaaatcatttctttagagggaaggaataatcattcaaatgaactttaaaaaagcaaatttcatgcactgattaaaataggattattttaaatacaaaaggcattttatatgaattataaactgaagagcttaaagatagttacaaaatacaaaagttcaacctcttacaataagctaaacgcaatgtcatttttaaaaagaaggacttagggtgtcgttttcacatatgacaatgttgcatttatgatgcagtttcaagt

SEQ ID NO: 2077 - DNA, 308 bp, Homo sapiens
  misc_feature 68: n = A,T,C or G
acatttattcttaacacgtggaacatatagtataaagatttcatactgaataaatgatattcattaanccaaaaaaggaaaaaaaggaggaatttacatcaagttttagctacattgttgaaatacaaatatgcagattttatcactgaaaaaatctcaattgtgtttcttcatcagaacttcaactgaacctagaactttttcacacctcgattagaaagaaaacaaaacaaaacaaaaacccagaaaaaaataaactataagttgattggctgctgagacggcaaggactttttacagagacctgt

SEQ ID NO: 2078 - DNA, 334 bp, Homo sapiens
  misc_feature 37, 97: n = A,T,C or G
acacagttagtgggagcacactatataaatcctttgnatgacaccattcaacaatattttttaaaatctacaaaattttaaagtttcacttccctancaaaatatcttcagtcaagaaattagtctttgaaaattatgaaaattgttgtgggaaatatttatacaaattattactgataatgcacatatattttgaaacattgtttctagaagcaataaaatataacctatttaggagataacccaaatgatttgtaaaaaaattaacttgtagaaaagggaaggatgttgtgtaaaatcaagtcaattatttgaggtttttataatattgagt

SEQ ID NO: 2079 - DNA, 426 bp, Homo sapiens
  misc_feature 68, 69: n = A,T,C or G
acaggaatggaaggagcattcactgcaggaggcctcagcacatcactcggtggtgataaagccactcnnccagtcagggatggaggagggggcccccctgccagcatcaggaccagacctctgggcatggctgatcccagctctggaatctgaagggatgacagggactttcacctctgctggtttgaagtctctaagcagttctgaggcgggcagtcttctcctgggagaagtcctcagaaacctttggaaagggaagaagctacgctaggccacagtgcataccacgaatgagaacaatggcagcggctgccgacaactctggatctaacacaaagacagatgacaaggggcagtgtcctgccaaggaatccactttacttcttttgagactggtttttacacatggtaaggatttgcttcagt

SEQ ID NO: 2080 - DNA, 554 bp, Homo sapiens
  misc_feature 457, 458, 498, 516: n = A,T,C or G
acatgccaaattataaataggtgctactggccttgagcatatcactgtgggacagttccccaattgtcaagtgtttagatatgtagactattgccatttgtttttttgttttggttttgctttgtgtctgaagctgaattgatttctttttttgaatgtgaaagttgaatttcaaacgtagtcatttcttacagatggccaagacagaaaattgtggctaggttgactgagaactgttgtcttccatgtattaacacaattaagctttttatattccactctctgtgctgaccctggctgaggcattttgggagacaaggactctgaatcttctgcttccattaaagaagaactgtgatattcaacattggatttctgagaataaagataggatgattcctttgaactttgacttacttgtataaaatgtccagctaggtttaggtttttgccattnnctatatactttgggtaaagctacatttgatgagcaatgtnaatgtttctgagaatgtncattcctgttttctcttaagagaatgtgctgtgtacct

SEQ ID NO: 2081 - DNA, 227 bp, Homo sapiens
  misc_feature 74, 75: n = A,T,C or G
acctgtgtgtatagaaatagattagagcacagttgaaattcatggaactggcattatttaagcaactggaattnnacactgtaggaaggttttgaaaattgtttggttgtagattttatcttatcctttagtgttgtgttcctactgtgatgtcttggtttttgtcatagacttaagtttataagtttgaactggacttgttcgattataaccacaaattgtgtgtg

SEQ ID NO: 2082 - DNA, 488 bp, Homo sapiens
  misc_feature 71, 72: n = A,T,C or G
cagcagccaccacagcgcctgcttcctcggccctgaaatcatgcccctaggtctcctgtggctgggcctanncctgttgggggctctgcatgcccaggcccaggactccacctcagacctgatcccagccccacctctgagcaaggtccctctgcagcagaacttccaggacaaccaattccaggggaagtggtatgtggtaggcctggcagggaatgcaattctcagagaagacaaagacccgcaaaagatgtatgccaccatctatgagctgaaagaagacaagagctacaatgtcacctccgtcctgtttaggaaaaagaagtgtgactactggatcaggacttttgttccaggttgccagcccggcgagttcacgccgggcaacattaagagttaccctggattaacgagttacctcgtccgagtggtgagcaccaactacaaccagcatgctatggtgttcttcaagaaagtttctcaaaaca

SEQ ID NO: 2083 - DNA, 120 bp, Homo sapiens
  misc_feature 18, 36, 43, 48, 64: n = A,T,C or G
ggaagggggggcacgaangctcatcattcaaaatanaacaaantaaanaagtattaaggcgaanattaaaaaaattttgcattacataatttacacgaaagcaatgctatcacctcccct

SEQ ID NO: 2084 - DNA, 279 bp, Homo sapiens
actgaccgccgcctgaatgtgtgggatttaagtaaaattggggaagaacaatcagcagaagatgcagaagatgggcctccagaactcctgtttattcatggaggacacactgctaagatttcagattttagctggaaccccaatgagccttgggtcatttgctcagtgtctgaggataacatcatgcagatatggcaaatggctgaaaatatttacaatgatgaagagtcagatgtcacgacatccgaactggagggacaaggatcttaaacccaaagt

SEQ ID NO: 2085 - DNA, 359 bp, Homo sapiens
acattataacctgtatggtattttatttaaaggagataaacagccaaatagcaaataggtcactgaatgataagatttgcaccttagaacaataatcattttaaggataacaagtaaatgtctgaaagcatgaggggctttatttgcctttacctcatatgagtctttgatcttgaaccgatacttttggatctcattgttgatatacctgaatttactttgtaagagattttaacttcacttcatgctgatgatgtatcaaattcattttatagaaagatttaaagtttttttctggaagtgatatatgtcaaattacatttcctactgcagtatttgagcagggacagtcatttttt

SEQ ID NO: 2086 - DNA, 175 bp, Homo sapiens
gcagcgcagaggaaaggcggcttttagccaggtatttcagtgtctgtagacaagatggaatcatctccatttaatagacggcaatggacctcactatcattgagggtaacagccaaagaactttctcttgtcaacaagaacaagtcatcggctattgtggaaatattctccaagt

SEQ ID NO: 2087 - DNA, 332 bp, Homo sapiens
  misc_feature 258, 259: n = A,T,C or G
acaaagtaaaataaataaataaatacacattttggcctattagcaaagattaagaaatgataacattaaatactcaataaatcaccatgagatggggactcaaacttctggtaaaaatacaaatagatataatttttcttgaaggcaatttagtagtctgtttatcctataattctacttgtaagatcctatcatatgaaaataaccagagatacaaagacattctgcaaagatatgttttatattgttatttattgnnacaaaaggaaataaaaagcctaaatgttcagaaaattattttaaaagatgaaagagggaaataggccatggac

SEQ ID NO: 2088 - DNA, 113 bp, Homo sapiens
acagcacaagaatgaacaatgggctattctttgaaaactcaaaacaaatgatttacacaaagacatatctataacataaaggtgaatggaccatgttattcttattcttaagt

SEQ ID NO: 2089 - DNA, 267 bp, Homo sapiens
  misc_feature 25, 41, 42, 76, 98, 107, 155, 159, 179, 239, 251: n = A,T,C or G
acttgtatacaagtaacattttatntaccataaaaatgtgnnacttctacaaaacccacaaacagtgaaaagacantctggtaaatccaaggtttgtnaaaactatncacaaaacccacagtatttgggaaaagaggcaaggtttatacaagtancagntttaaaaatgtaactttgtnctactatcaattacacattaacatacacacactaattgaaaatatgctacaaccatgttntggaaaagcagnttaacattttctaaat

SEQ ID NO: 2090 - DNA, 293 bp, Homo sapiens
attttagattgaaaaatatttagttgtctcattacctcttctaaacacaaaccagctgatgtattttaatctgtttctgttctatcttgtaattaatttggtgggttctacttgttttaacataaataaagagtatgcagcacgtttaataaaatcagaactcttaattggcttatgcccaggtctaggctgagaagtcctttttcttcttcccacctttatttccttagtttctgtccaccttaatcgaaacaacacatggttatgtctttttcctgctacaactacagggt

SEQ ID NO: 2091 - DNA, 538 bp, Homo sapiens
acactatgctgtatttggtgctatacctgcaggcccgcttcacttggcgaggagcccgcctgctccggcccctcctgcagttcaccttgatcatgatggccttctacacgggactgtctcgcgtatcagaccacaagcaccatcccagtgatgttctggcaggatttgctcaaggagccctggtggcctgctgcatagttttcttcgtgtctgacctcttcaagactaagacgacgctctccctgcctgccctctgctatccggaaggaaatcctttcacctgtggacattattgacaggaacaatcaccacaacatgatgtaggtgccacccacctcctgagctgtttttgtaaaatgactgctgacagcaagttcttgctgctctccaatctcatcagacagtagaatgtagggaaaaacttttgcccgactgatttttaaaaaggaaaaaaaaaatgttttactatgtggccttccaaaataggtagtgtttgcctatgtggaaacaacagcaaactaacaccaagtgccagagt

SEQ ID NO: 2092 - DNA, 498 bp, Homo sapiens
  misc_feature 480: n = A,T,C or G
actcatgcccgactgtctaccaggcacacagactttgaggagagggcgtatgtcgtcttgatccgcatcaatgatgggggtcggccacccttggaaggcattgtttctttaccagttacattctgcagttgtgtggaaggaagttgtttccggccagcaggtcaccagactgggatacccactgtgggcatggcagttggtatactgctgaccacccttctggtgattggtataattttagcagttgtgtttatccgcataaagaaggataaaggcaaagataatgttgaaagtgctcaagcatctgaagtcaaacctctgagaagctgaatttgaaaaggaatgtttgaatttatatagcaagtgctatttcagcaacaaccatctcatcctattacttttcatctaacgtgcattataattttttaaacagatattccctcttgtcctttaatatttgctaaatatttcttttttgangtggagtcttgctctgtc

SEQ ID NO: 2093 - DNA, 243 bp, Homo sapiens
gtctcctgcagcgtctggggtttccgttgcagtcctcggaaccaggacctcggcgtggcctagcgagttatggcgacgaaggccgtgtgcgtgctgaagggcgacggcccagtgcagggcatcatcaatttcgagcagaaggaaagtaatggaccagtgaaggtgtggggaagcattaaaggactgactgaaggcctgcatggattccatgttcatgagtttggagataatacagcaggctgt

SEQ ID NO: 2094 - DNA, 193 bp, Homo sapiens
  misc_feature 11, 12: n = A,T,C or G
ggtagaggttnntctattttaacatttctgaaatcatatagatttacatgattgttctcacgtaacctgtaacataagcatttcccaagttgctattatctgttaataacagtggtttgattaattggattggctgtgtggatgtggaacggaagagccttgatgtcaagaagagctgaagcacagaaggtgc

SEQ ID NO: 2095 - DNA, 340 bp, Homo sapiens
caataattgaggagcagcccaaaaactatcaagtttggcatcataggcgagtattagtggaatggctaagagatccatctcaggagcttgaatttattgctgatattcttaatcaggatgcaaagaattatcatgcctggcagcatcgacaatgggttattcaggaatttaaactttgggataatgagctgcagtatgtggaccaacttctgaaagaggatgtgagaaataactctgtctggaaccaaagatacttcgttatttctaacaccactggctacaatgatcgtgctgtattggagagagaagtccaatacactctggaaatgattaaactagt

SEQ ID NO: 2096 - DNA, 306 bp, Homo sapiens
acaggtggtcattacagaccctgaaaaactggaccaaattagacagagagaatcagatatcaccaaggagagaattcagaagatcctggcaactggtgccaatgttattctaaccactggtggaattgatgatatgtgtctgaagtattttgtggaggctggtgctatggcagttagaagagttttaaaaagggaccttaaacgcattgccaaagcttctggagcaactattctgtcaaccctggccaatttggaaggtgaagaaacttttgaagctgcaatgttgggacaggcagaagaagtggt

SEQ ID NO: 2097 - DNA, 324 bp, Homo sapiens
ggaagagcaaccgagatgaaggtgaagatgctgagccggaatccggacaattatgtccgcgaaaccaagttggacttacagagagttccaagaaactatgatcctgctttacatccttttgaggtcccacgagaatatataagagctttaaatgctaccaaactggaacgagtatttgcaaaaccattccttgcttcgctggatggtcaccgtgatggagtcaattgcttggcaaagcatccagagaagctggctactgtcctttctggggcgtgtgatggagaggttagaatttggaatctaactcagcggaattgtatccgt

SEQ ID NO: 2098 - DNA, 432 bp, Homo sapiens
acactccagcgaagccgaggcccggccaacgctcgtgaagtttccacagagaagagcctgcaaaactcccactggaagaggagaaataaaggccatggaaagaaaccccagggaagagacaggcctcgttcacagaccctaggcagggaataaaaaattcaagtcattcacagaagtcttgaaaggcatgaggatttctgacagttcctagaaaaaggcaacattttctttatctttgtatccattggccaagaacgccgacatgtgagacttgcttcaccagccgccaccgcttccttacaatctcccgcactgctggagcgggctgggtaactacaggactgtgctctgtgtgataagatttggtgattccactttataagaaaggaaactgctttaattaaagcaggttaataattaaaacttcaaagt

SEQ ID NO: 2099 - DNA, 506 bp, Homo sapiens
actcaacaacttcaattcatttttttctggttcaagatgagtaggagcctaataaggctgtgataaaagggcaaaaggcactgagagccaaaagcggattaatgagctcctccatttatttgtcttcctaacagctgaactgttacaactattgacactcttcaaaaaggttccgctctgaaccctgtccaggcactgcaggctccaatggacatcttcaaatccagagaatggaggggcaagagcttcccctgtgtgatgccaaaaccaacaaagccccatggatcaggtaatgaaacttcagcttttccccctttgagatttatttactggcagctgacaaagggcaaattcagctcgaattgtgcagtcaaggccctgtcaagcttttagaggcacccttgtcttgaagcaccttcatgactggcatttcactcaaaagccctcggcactggtccttaacagcttatgacatcacaaaggacactccagacagatgcctacat

SEQ ID NO: 2100 - DNA, 550 bp, Homo sapiens
  misc_feature 491: n = A,T,C or G
acagtatattttaaattaagaaaagtgaactatatgtatttgttttatacatttaaggcttagactcataaataatgctattgtttatgatttgaaaactttcaggcaaaatccaatttacatttttcccttccctagcaattacttttttccagcttcaactcttcttagttactaatactttgttgactttaaaaatgaaatcattcacaaacttttggtatatgatggagaatgaaaaactagagtcagacagctttaattgacattgtcaacacctccagttatcaggaatacatttttttactgccttaacctgtagtgcgtagaatatgcatcaatttcttgaaggagattcatgtttttataagaattttcatgtaattattgcaattgtggtcaaataaggaacgtttcctgcttgaaattatattgatttaaatgatgtgtgagatgtttcaccattttcaggcactgtgtaattctattgnaaataaactggcaggtatctttgtaactataaaatagtgcatgctcagccatgtacctg

SEQ ID NO: 2101 - DNA, 365 bp, Homo sapiens
  misc_feature 273: n = A,T,C or G
gttacatgtctttattacataaacatcataatatttctcataggagttggtcttcagtttgcttgttgctttcgcagaatgtcaaatatctatagaaaatgtctaattatttatgaacaaacattcccatccctgccccgcaaaaaatctcattgcctgcaattcctaaccagattcctgagaaaaataataggatttattttatagcatcatacatagattttctttcaagatataaaaaaggacagacttctaaaacatgaatctcctttngtttacaaagttctataaaaatacattaagtatgttcaaatgtttgttctttcactttatattccagtttaccagaaacaaaaaatggcagt

SEQ ID NO: 2102 - DNA, 182 bp, Homo sapiens
acagggaggaatttgaagtagatagaaaccgacctggattactccggtctgaactcagatcacgtaggactttaatcgttgaacaaacgaacctttaatagcggctgcaccatcgggatgtcctgatccaacatcgaggtcgtaaaccctattgttgatatggactctagaataggattgcg

SEQ ID NO: 2103 - DNA, 281 bp, Homo sapiens
acctccgaatcaattaccgccaattcttcacagcacctgccactgtctccctggtgggagtcaccgtcttcttcagcttcctagtatttgggatgtatggacgataaggacataggaagaaaatgaaaggcatggtctttctcctttatggcctccccacttttcctggccagagctgggcccaagggccggggagggaggggtggaaaggatgtgatggaaatctcctccataggacacaggaggcaagtatgcggcctccccttctcatccacaggagt

SEQ ID NO: 2104 - DNA, 255 bp, Homo sapiens
  misc_feature 11, 200, 222: n = A,T,C or G
acctgcgatgnttacgtccacaccgagcccagtgtgggactgacatttctcaatggaagtgaaatttgggattggactttgaagacggattactaaataataattattatatgtaactgaagcaacctacttttgaaaatcaactgtattgggtagtgggaggtgggagggaagggctttgggaaggggatgaatatctntttttacctttaacagacttgnttaatcttctcgatgtaggatgtttatgtaggt

SEQ ID NO: 2105 - DNA, 143 bp, Homo sapiens
  misc_feature 13, 14, 73: n = A,T,C or G
ttttttttttttnnttttttttttttttagaggaaaacccggtaatgatgtcggggttgagggataggagganaatgggggataggtgtatgaacatgagggtgttttctcgtgtgaatgagggttttatgttgttaatgtgg

SEQ ID NO: 2106 - DNA, 397 bp, Homo sapiens
ggtgatcagggctgaacagagagaactcaccatggactttgggctgagctggcttcttcttgtggctattttaaaaggtgtccagtgtgaggtgcagctgttggagtctgggggaggcgtggtccagcctgggaggtccctgagactctcctgtgcagcctctggattcaccttcagtaactatggcatgcactgggtccgccaggctccaggcaaggggctggagtgggtggcagttatatcatatgatggaagtaataaatactatgcagactccgtgaagggccgattcaccatctccagagacaattccaagaacacgctgtatctgcaaatgaacagcctgagagctgaggacacggctgtctattactgtgcgaaaaggccgaatcggggt

SEQ ID NO: 2107 - DNA, 515 bp, Homo sapiens
acctctatgtttaaagaaagaagaaaaaaacccagaatttggttgtagaaaacaatgcccacaacagactggccagtgcttagacaaatttggggttggggggaacactttggtttgaaagcacagagcagtttgccatgtttcttctgtgcctaccattctcccttggcctcaacttctgtaagatgggggggggacaaaaagagaagtaaagttaagaagaaagtggaaaattaaaaaaaaagatgtcaaagtttttacatgcatatatttcagcttatgctgaagacctacctgtatgttgcacattgaatcatactttcagaacccctcagaaaccatccctctctccctaaagaattttaaaaggaaaacaaaacctcgagtatagatcttacagatgagcaagcattcaggccttagccaaagaatgcagtggagccttcccccttcaactgcattgtgaatgaataccaattaacagcataaaaattaatagtcccatatcagatctg

SEQ ID NO: 2108 - DNA, 88 bp, Homo sapiens
  misc_feature 36, 40, 50, 55, 70: n = A,T,C or G
acaagctttttttttttttttttttttttttttcgnaaanatggggtttnaccgngttagtcaggatggngtcggtctcctgacctcg

SEQ ID NO: 2109 - DNA, 499 bp, Homo sapiens
  misc_feature 415: n = A,T,C or G
accctccagaaattggtgactttgcttttgtgactgacaacacttatactaagcaccaaatcagacagatggaaatgaagattctaagagctttaaactttggtctgggtcggcctctacctttgcacttccttcggagagcatctaagattggagaggttgatgtcgagcaacatactttggccaaatacctgatggaactaactatgttggactatgacatggtgcactttcctccttctcaaattgcagcaggagctttttgcttagcactgaaaattctggataatggtgaatggacaccaactctacaacattacctgtcatatactgaagaatcttttcttccagttatgcagcacctggctaagaatgtagtcatggtaaatcaaggacttacaaagcacatgactgncaagaacaagtatgccacatcgaagcatgctaagatcagcactctaccacagctgaattctgcactagttcaagatttagccaa

SEQ ID NO: 2110 - DNA, 100 bp, Homo sapiens
acttcaactaccatgtgaaacacatccttatctgcataaattggaatatcatgaaatggagatatatattgtcctttctcatttttgaggaagactcggt

SEQ ID NO: 2111 - DNA, 200 bp, Homo sapiens
acacctcggagcagtcgggcagcaggagggccggaagcctggttggtttgtatatgacctctcttgcccttgtgcactttccttgatttagcaaccttgacctgcactggccctcacagctgttggagggaagtagcctcttgcagggaaatattttcccctgccctggaatctcctatgtgcctgttaaagattccagg

SEQ ID NO: 2112 - DNA, 523 bp, Homo sapiens
  misc_feature 472, 488: n = A,T,C or G
cgtggacgccgccgaagaagcatcgttaaagtctctcttcaccctgccgtcatgtctaagtcagagtctcctaaagagcccgaacagctgaggaagctcttcattggagggttgagctttgaaacaactgatgagagcctgaggagccattttgagcaatggggaacgctcacggactgtgtggtaatgagagatccaaacaccaagcgctccaggggctttgggtttgtcacatatgccactgtggaggaggtggatgcagctatgaatgcaaggccacacaaggtggatggaagagttgtggaaccaaagagagctgtctccagagaagattctcaaagaccaggtgcccacttaactgtgaaaaagatatttgttggtggcattaaagaagacactgaagaacatcacctaagagattattttgaacagtatggaaaaattgaagtgattgaaatcatgactgaccgangcagtggcaagaaaangggctttgcctttgtaacctttgacgaccatgact

SEQ ID NO: 2113 - DNA, 295 bp, Homo sapiens
acagtcagaatattcctgttcctactacagttcctgttcctgtgccagttcctgtttttctgcctgctccattggacagcagtgagaagattcctgcagcaattgaggagctaaaaagcaaggtttcttcagatgctcttgatacagagttgcttacaatgacggatatgatgagtgaagacgaggggaaaacagagacaaccaacatcaacagtgtaattattgaaacagatataattggttcagaccttttgaagaactctgacccagagacacagtccagcatgcctgatgt

SEQ ID NO: 2114 - DNA, 160 bp, Homo sapiens
  misc_feature 11: n = A,T,C or G
acctgctgtantcacgagggacgggcggcggcctggtcggcagagagtagcctgcaacattcggccgtggttacgatgagtttacccctcaatcccaaacctttcctcaatggactaacaggaaagccagtgatggtgaaacttaagtggggaatggagt

SEQ ID NO: 2115 - DNA, 183 bp, Homo sapiens
acgcatcatgtggtctcagcgtgatccatcacttcgcaaaagtggagtaggcaacatattcattaaaaatctggacaaatccattgataataaagcactgtatgatacattttctgcttttggtaacatcctttcatgtaaggtggtttgtggtgaaaatggttccaagggctatggatttgt

SEQ ID NO: 2116 - DNA, 306 bp, Homo sapiens
acgacatctcagacatgacttctattgccaggctggtcaagtggcagggtcatgagggagacatcgataagggtgctccttatgctccctgctctggaatccaccagcgggctatctgcgtttatggggctggggacttgaattggatgcttcaaaaccatcacctgttggccaacaagtttgacccaaaggtagatgataatgctcttcagtgcttagaagaatacctacgttataaggccatctatgggactgaactttgagacacactatgagagcgttgctacctgtggggcaagagcatgt

SEQ ID NO: 2117 - DNA, 132 bp, Homo sapiens
  misc_feature 12, 29, 31, 69, 84, 117, 118: n = A,T,C or G
acagggcctgcntgaactcaacggaaatnancccatggagatcaaagtcctgggtccttatacctttancatctgtgacacctncaacttctccgactacatccgtggaggcatcgnnagtcaggtcaaagt

SEQ ID NO: 2118 - DNA, 191 bp, Homo sapiens
acaattaaacattttcaaaaggtgtaatttatttaaaattgtctcattttggtaaaatttatgtgaacttttaaagctaaatattaaacttaatatgctatgtaaatatatacatatatacatttaatgatgtatttttttaaaacattggcttgcttttgttaaagtgcaagtgttacatatggctttgt

SEQ ID NO: 2119 - DNA, 359 bp, Homo sapiens
accatcaagctcaaggtgtttctgtcaggaatgccagagctgcggctgggcctcaatgaccgcgtgctcttcgagctcactggccgcagcaagaacaaatcagtagagctggaggatgtaaaattccaccagtgcgtgcggctctctcgctttgacaacgaccgcaccatctccttcatcccgcctgatggtgactttgagctcatgtcataccgcctcagcacccaggtcaagccactgatctggattgagtctgtcattgagaagttctcccacagccgcgtggagatcatggtcaaggccaaggggcagtttaagaaacagtcagtggccaacggtgtggagatatctgtgcctgt

SEQ ID NO: 2120 - DNA, 361 bp, Homo sapiens
  misc_feature 310, 351: n = A,T,C or G
actaccttaccctagagtaaatcactgggaaatacaggcagaaaacagacatcctgcctgtgaaaacaattgcatattcaaactggagagagtcatagcacgtatgcttttaaaagtaagtttcgaaaaactgttttatcagttttgttttttttttttttttggagcatgtcttttctaaataattctcacttatcattccagaaaatataacaaacagtttgtaagaactcatgcaaaaatgtttctctaaggccataaattggtttgctaagttgcattgttttattcaagtaaaaagcccttctanagaacaaggagtctgtaaagaaaaccaatcaccttcaactnttgggcctgt

SEQ ID NO: 2121 - DNA, 82 bp, Homo sapiens
  misc_feature 16: n = A,T,C or G
acttttatgttactgnctgtaaagagggatttaaaatgtgtattttaaacacagcagttgagctgagtgcattttctatagt

SEQ ID NO: 2122 - DNA, 287 bp, Homo sapiens
accttcagatgggcactcagaagagtaagcccttagttaatgtttaaagatgtttaaagatgtctgagactcataggtcaaagtcagatttcagttccaccttattagacctgcactgctaaggagctgctttaggtaaggctgtgttcctagtcaccagggtgttcaaacacagtgctgggggcaatgtgggaatagccttcttttatttaggaagtaatgtgaagtcagtttcatgaatagatcttactttaagcattcattgaggtttttggcaagaatagagt

SEQ ID NO: 2123 - DNA, 335 bp, Homo sapiens
accacttgcagtcaaatgaattccttcgaaatgtatttgaacttggacccccagtgatgcttgatgctgcaacgcttaaaacgatgaagatttctcgtttcgaaaggcatttatataactctgcagccttcaaagctcgaaccaaagctagaagcaaatgtcgagataagagagcagatgttggagaattcttctagattttcagaacttgaagactattttctaatttctattttttttctatttcaatgtatttaaactctagacacagtttttatcctggattaacttagataacttttgtagcagtggttatattgcttataatttaatgt

SEQ ID NO: 2124 - DNA, 513 bp, Homo sapiens
acgaggtggctcgactgctcaacctcaccgagaggcaggtcaagatctggttccagaaccgcaggatgaaaatgaagaaaatcaacaaagaccgagcaaaagacgagtgatgccatttgggcttatttagaaaaaagggtaagctagagagaaaaagaaagaactgtccgtcccccttccgccttctcccttttctcacccccaccctagcctccaccatccccgcacaaagcggctctaaacctcaggccacatcttttccaaggcaaaccctgttcaggctggctcgtaggcctgccgctttgatggaggaggtattgtaagctttccattttctataagaaaaaggaaaagttgaggggggggcattagtgctgatagctgtgtgtgttagcttgtatatatatttttaaaaatctacctgttcctgacttaaaacaaaaggaaagaaactacctttttataatgcacaactgttgatggtaggctgtatagtttttagtctgtgtagtt

SEQ ID NO: 2125 - DNA, 287 bp, Homo sapiens
accccccaacacacacaaattgggaatgaaatatgtaattatagccatctttatatgaaatatccaaacaacaaatatatttaataatataaagatagtgccaaaatcaacaaaaactaagaatactgaggcttaactgaccccgattcgtatgattttgaaataaaatgttcagactttctagctttatcttaatttgcctttgcttcactgctttatgtagttacaatgtaaatctaagagatgcttaaaacagattaaaataatattgttaaaaaacatttttc

SEQ ID NO: 2126 - DNA, 244 bp, Homo sapiens
acaaaaatggttataaaatggttgaagcaactagaagcgtgacaggtataatacatataaatacagccaaaattcaattcaatgcaaagttgaatgacatcatattgcaccaaaatttattccatacaaaagcacatgcatcaagagtttccataagatgaaaacaaacacacttacttcatagcatcttaccacttacttacacaaatagcccataaacaccatctggcattgtgattgcagt

SEQ ID NO: 2127 - DNA, 389 bp, Homo sapiens; identical to SEQ ID NO: 1865

SEQ ID NO: 2128 - DNA, 173 bp, Homo sapiens
acacaaagaccatcgagacggccattcttgtttacaaaacacttaccaagaaagcactttgtaggggaactttagtaagttcttctcatttcattatgtttcttccaaggaaacaggagagactgaattaataattctctctttcctcttaagcacttttaaaataataaagt

SEQ ID NO: 2129 - DNA, 257 bp, Homo sapiens; identical to SEQ ID NO: 1118

SEQ ID NO: 2130 - DNA, 408 bp, Homo sapiens
cgccctcctctgaggagcttcaagccaacaaggccacactggtgtgtctcataagtgacttctacccgggagccgtgacagtggcctggaaggcagatagcagccccgtcaaggcgggagtggagaccaccacaccctccaaacaaagcaacaacaagtaccctttgactcttagccagattaggatcttgatgagaacaagaggcattgattgttcttgaaagcatcattccaggtttgttgaaagtgggatactgaggtgagaaggggccagttagcacgcaccagagacaaagcttgggccttcaggggagtatgggttcttggctctgttagtatgtagaaggatttgtagcattttaaattgatgaacttgatctgggtcttcaaaaatatttttaggttagt

SEQ ID NO: 2131 - DNA, 541 bp, Homo sapiens
  misc_feature 491: n = A,T,C or G
acacttgaaaccaaatttctaaaacttgtttttcttaaaaaatagttgttgtaacattaaaccataacctaatcagtgtgttcactatgcttccacactagccagtcttctcacacttcttctggtttcaagtctcaaggcctgacagacagaagggcttggagattttttttctttacaattcagtcttcagcaacttgagagctttcttcatgttgtcaagcaacagagctgtatctgcaggttcgtaagcatagagacgatttgaatatcttccagtgatatcggctctaactgtcagagatgggtcaacaaacataatcctggggacatactggccatcaggagaaaggtgtttgtcagttgtttcataaaccagattgaggaggacaaactgctctgccaatttctggatttctttattttcagcaaacactttctttaaagcttgactgtgtgggcactcatccaagtgatgaataatcatcaanggtttgttgcttgtcttggatttatatagagcttcttcatatgtctgagt

SEQ ID NO: 2132 - DNA, 176 bp, Homo sapiens
acaccccgttagtccctgatcccaaccttctccctcctgccagcacaccgatgcacacaccggaagtggcgagcccaagccctggggacaggtgtagggagaaaagcagccccaggcctcagactcgcttcccatcctggcatagagtgggggatggctggagggtgtctataggt

SEQ ID NO: 2133 - DNA, 443 bp, Homo sapiens
actgaggctgctaaagctgccagtcacaacccagcatgtcaactggttcctcatgctctgtttggtgtggaaattcacatgtgccctgacactgaggaagcaattgcttaaaatcactttccaataacagctgataaaatattttgcaggtttgtcatgcaaggtttatttattaggtggctattcaaagtttgtatagcaaccacttaagcagaactaaattaatattcactgagcactgtaacgatggaagagggcttttcctaagggttgggttgggagttgtgcttctgtgaaattaacatctctcactcattgccaagattctctgcttaaaaatattagttttctgtgctgttgccaaaatagcaatttaagcaaatgtagtgccagaatgacacatgagcctcggactcagggaacagttccactgactgtggagt

SEQ ID NO: 2134 - DNA, 325 bp, Homo sapiens
  misc_feature 301: n = A,T,C or G
acaagcagttaatcacccaccatagggcatgattaacaaagcaacctttcccttcccccgagtgattttgcgaaacccccttttcccttcagcttgcttagatgttccaaatttagaaagcttaaggcggcctacagaaaaaggaaaaaaggccacaaaagttccctctcactttcagtaaaaataaataaaacagcagcagcaaacaaataaaatgaaataaaagaaacaaatgaaataaatattgtgttgtgcagcattaaaaaaaatcaaaataaaaattaaatgtgagcaaagaatnaaaaaaaaaaaaaaaaaaaaaaaa

SEQ ID NO: 2135 - DNA, 113 bp, Homo sapiens
acaagaatgcaatggtttcatccattcagcaaacaaaaatacatgtctgttttatttttgcctaaattctgctataatttgaacaaaattctaaaacaaaagccacacagagt

SEQ ID NO: 2136 - DNA, 312 bp, Homo sapiens
acttttcaattatgttaacgtaaaatactcgtaacgaatgtagtatgagtttaaagtgagcttttcagatcctataagtgcatcctaagtaatgacaggctttaagataaggaatatatgcattttgttaaggcagaaatctcataaaatttcatgaaaaaccatggtcaatccaatgatgcactttttaagacaagtttgtctggaaactggaagggtcaaaagacaacaaaaaagcacacaccaaaaaacctcactttaagcaaatctataacttgaaaaaaaaaagcctaagaatgttctgagagtggt

SEQ ID NO: 2137 - DNA, 393 bp, Homo sapiens
actcagaaatcatctgttctacctctttatgaagtaagttctttcttacatctttgtgttccaaaataatttgtagaatttagaagtgtaattttgttatattgcattctagaatacttttcaggagctccaggtaatgaggcggagcctgaatttgtttagaacacaaatgatggatttagaattggcaatgctgcgtcagcaaaccatggtttatcatcatatgactgaggaggagaggtttgaagttgatcagctccagggtttgagaaattcagtccgaatggaacttcaggacctggaactgcagctggaggagcgcctgctgggcctggaggagcagcttcgtgctgtgcgcatgccttcacccttccgctcctccgcactcatggt

SEQ ID NO: 2138 - DNA, 498 bp, Homo sapiens
  misc_feature 489: n = A,T,C or G
accacacaatactaacccttcccctcctctgatgtcttacatcacctcccaggagatgaagtgtattcttcactggtttgccaattggtcaggtccccagcgtgaacgtttcctagaggacctggtagctaaggcagtgccagaaaaattacaaccactgctggatagtctggagcagcttagtgtgtctggggcagaccgaccaccttctatctttgagtgccagctacatctttgggatcagtggtttcgaggctgggctgagcaggagcgcaatgaatttgtcagacagctggagttcagtgagccagacttcgtggcaaagttttaccaagcagtggctgctacagctggtaaggactgataggcattcagaccaaagaagataaccatagctgatggagccatgactctctacaatgataactcaattcaaatgtgttgcctaaagctctggaactggtattccaaccagctgaccgaactcantgaccaggt

SEQ ID NO: 2139 - DNA, 511 bp, Homo sapiens
  misc_feature 422, 432, 493: n = A,T,C or G
acaaataaagtgcatttttaaatagccctatttaactttggtggatgaagcttcaaactttatattaaggcacctggaattctcccccccttctttttcaaacaccaggaaaatgcattcacaaaatttatagttacacggacagaattttagtttatctaatgtaattttagcccatttaggtcaaacataaactcaattttcaaagtaacattgtttggaaaacattttcaacagactaattttacagaacattttttttctgtagactaattcatgaacgaagatcaatgaccaatattagtgttacttactctgtcattagcaatttcaaacagtatgatgattcatatactgagcttttgaaaaatcccacaagtttgagaaatagttacacagtatttttgtaaggaattttttgnctaatcttgngtcaagttgatgtcactaatataccaatcaattaagtccatagtctctgataaactatggntgacaaatcacatgaagt

SEQ ID NO: 2140 - DNA, 377 bp, Homo sapiens
tttacatcaagaattttggagaagacatggatgatgagcgccttaaggatctctttggcaagtttgggcctgccttaagtgtgaaagtaatgactgatgaaagtggaaaatccaaaagatttggatttgtaagctttgaaaggcatgaagatgcacagaaagctgtggatgagatgaacggaaaggagctcaatggaaaacaaatttatgttggtcgagctcagaaaaaggtggaacggcagacggaacttaagcgcaaatttgaacagatgaaacaagataggatcaccagataccagggtgttaatctttatgtgaaaaatcttgatgatggtattgatgatgaacgtctccggaaagagttttctccatttggt

SEQ ID NO: 2141 - DNA, 436 bp, Homo sapiens
  misc_feature 9, 339, 402: n = A,T,C or G
acacacaanagcctctataccacccacttggcagaccatcatcttgttcttataattattgcaagtgaggttagaaagaattccagctgcacaggtgaccacatttatatcatctgaacccagaagctgaacaagagtcccaaggagaccttccatcccttcctgtttagttgcagcatctgaaagattcctgagagtccaaagacagttctgaacaagacgttgacttggatctgtcaggtgaagtcctaaagcttgcattccaccagcttctacaatagccggcttattactagagcagacagatagcaccttcagcactctgcttgtggtccatantagtttttcgtaagtataggtcctcattatatttactaaagcttggggtccaccactagccantatgatgagcttgctttcttggttgccataagct

SEQ ID NO: 2142 - DNA, 393 bp, Homo sapiens
gtaaattctcccaggagctgttttactgtctacttttcaggattaaaaaaaaaatcaaaacttaaaaaaaaaaagtttaaaaagcaaaatggggagggggaggaagcagtgacttttttttggtaattatgcgcttttttttaatttttagaatttgtctttttactgtgggtgggctgttgatatttcatcaagataagcatttctttcctgagttcaggtgactgaggaagagccacaaaacaaaacacaacaaaaccaaaccacagaatcatctttaacccaactttttatacgatgccccagttccccataactttgcacacaagcttctgtgttcagttgaattgtaactgctttttgtatttggagagagtgactattgaacttgaa

SEQ ID NO: 2143 - DNA, 398 bp, Homo sapiens
caggtgaaggaactgagcagttgaactctgagttcatcaattgtaatatttggaaattatctacaatggaatcttccctctgttctctgataacctacttgcttactcaatgcctttaagccaagtcaccctgttgcctatgggaggaggtggaaggatttggcaagctcaaccacatgctatttagttagcatcagttgtcgccaacagtctttctgcaaagggcaggagagctttgggggaaaggaaaaggcttaccaggctgctatggtcaactcttcagaaattttcagagcaatctaaaagcgccaaaattcgctatgtttacagtgatactattaagaaaatgaatgtgattctgctctgtctttttaagtatgatcaaataaaaaatttgt

SEQ ID NO: 2144 - DNA, 96 bp, Homo sapiens
  misc_feature 12, 14, 15: n = A,T,C or G
actttaaggttngnngcacttacaaggctgtggtagaatcataccccatggataccacatattaaaccatgtatatctgtggaatactcaatgtgt

SEQ ID NO: 2145 - DNA, 557 bp, Homo sapiens
acagtagaagctctgcaaaatcttaaaaatttgaaaagtcttgacctgtttaactgtgagatcacaaacctggaagattatagagaaagtatttttgaactactgcagcaaatcacatacttagatggatttgatcaggaggataatgaagcgccggactctgaagaggaggatgatgaggatggcgatgaagatgatgaagaggaagaggaaaatgaagctggtccaccggaaggatatgaggaagaggaggaggaagaggaagaggaggatgaggatgaggatgaagatgaagatgaagcaggttcagagttgggagagggagaagaggaagtgggcctctcatacttaatgaaagaagaaattcaggatgaagaagatgatgatgactatgttgaagaaggggaagaagaggaagaagaggaagaaggaggtcttcgaggggagaaggggaaacgagatgctgaagacgatggagaggaagaagatgactagatcattctaagaccagattctctaatgttttctgggtgtgcaatagagtgatcacatctttg

SEQ ID NO: 2146 - DNA, 434 bp, Homo sapiens
acttgcatgtaggacaactcagttagaaaagtatagtgaatggatggaatctactgtatgataaaaatgctacaaacaccatttagttgccatcaataagaaatttacttgttttaaaaaaatccaaatgctggcattgtccagaaaaatttaacaggtttatttataattattataaagttgaaccgctgaaacttgttcactgaaacatttcattctcaaaaaaaaaaaaaatttctcttcttcctgttattggtagttctgaacgttagatattttttttccatggggtcaaaaggtaccagccaggctgatcaaaaagttctaattgaggacatcccccccttcccaaatttaaatcttgtatgctggaaaaataatttaatgtcagatgtaaacacaacactttcaactagaggagtggcagctggggt

SEQ ID NO: 2147 - DNA, 428 bp, Homo sapiens
  misc_feature 33, 69, 120, 131, 162, 242, 315, 370, 379, 415, 420: n = A,T,C or G
gcttttttttttttttttttttttttttctttnaaaattatttttatgtttatttcacttgaacaaaanaaaaagcaactaataaaattgaaggaagagctgaactaccgaatatttttntttaactcaanaactttcagttacaggaagatttatctaatnttaaaatgactaaattacaaaaagcataaaatgtttgaagccatttttaaagttgttttgaaatccatattagcactcanacttccccactccctaacttttgttaattgctgtaatggacatttgttgttttgatctacccaacatcctttnatcctactttggtaactgatattctttgggggaactgatctttccactttacatnatgttttgnggaaatttttcaactaaggaacctgccctatgctanctaanagttgagt

SEQ ID NO: 2148 - DNA, 532 bp, Homo sapiens
acctggggcagatccaacacatcctccgctgcggcgtcaggaaggacgaccgcacgggcaccggcaccctgtcggtattcggcatgcaggcgcgctacagcctgagagatgaattccctctgctgacaaccaaacgtgtgttctggaagggtgttttggaggagttgctgtggtttatcaagggatccacaaatgctaaagagctgtcttccaagggagtgaaaatctgggatgccaatggatcccgagactttttggacagcctgggattctccaccagagaagaaggggacttgggcccagtttatggcttccagtggaggcattttggggcagaatacagagatatggaatcagattattcaggacagggagttgaccaactgcaaagagtgattgacaccatcaaaaccaaccctgacgacagaagaatcatcatgtgcgcttggaatccaagagatcttcctctgatggcgctgcctccatgccatgccctctgccagttctatgtggtgaacagtgagctgtcctg

SEQ ID NO: 2149 - DNA, 458 bp, Homo sapiens
  misc_feature 401, 455: n = A,T,C or G
acattacaggaattgtatgttcacttcgaatcatgtttgaaaaaacgttgtatccttattttgtaattcatatagtaagagtattctaaacagcactacattaatatcatttgataggtataaagtatactttttcttgcactcttctctaggatttaatgcattgatcattcttaatgaacaatatcagctctaaaggaccaatgcttttataatgttttcaactgtatctgagtcagccagagagataaatatccatgtataaaatagatagaaaactttgcttggtaatttaaaattaataatgccagttttccaagagtgagaaaatcattgcactctatacagttttaagatatacttaaaatattcccatttgtatctatttttttttctactgntttttatttggacacttacataacaggtgcagagcacaatgctgtgtaacatangaa

SEQ ID NO: 2150 - DNA, 450 bp, Homo sapiens
ataaggaatttcctcccaattcatggatatggccatcatctgattagtcattcagttgcagttctcttcaatgctggacacacggtttccaaggatcaaagtcttgaggagtgctagatcaggaaatgggagaagcaaggcaaggagaagagggcatcaggagttggaatttctgaaatgtgcatttatctcacagaaggcttggcacaatgaggctggggtgagtgtggttttagtgattgttctttgttgcctccttagctgcagcaatcagtggagtgaggctggagaggggcttggcaatcttcaggaattgatgctgtagcagctctttagctgaacctctcttctccacatccatctcgagacagcggttcagaaagtcccggaagatagctgacagcttctctgggttctgaagttctggggtcccattggtggcaatgaggt

SEQ ID NO: 2151 - DNA, 408 bp, Homo sapiens
  misc_feature 15, 212, 401: n = A,T,C or G
actattgacccagcnatgggggcttcgacatgggctttagggagtcataagtggagtccgtaaagaggtatctttactataaaagctattgtgtaagctagtcatattaagttgttggctcaggagtttgatagttcttgggcagtgagagtgagtagtagaatgtttagtgagcctagggtgttgtgagtgtaaattagtgcgatgagtangggaagggagcctactagggtgtagaataggaagtatgtgcctgcgttcaggcgttctggctggttgcctcatcgggtgatgatagccaaggtggggataagtgtggtttcgaagaagatataaaatatgattagttctgtggctgtgaatgttataattaaggagattttgtagggagattagtatanagaggta

SEQ ID NO: 2152 - DNA, 424 bp, Homo sapiens
  misc_feature 414: n = A,T,C or G
atttttatattatttatttattcttcgttagtttgtttttggagcgtgggttttgttttgttttttgatttttttctttttttcgacctacggatttattcttattgcccaggcttgagtgcagtggcgtgttctcagcttactcaacctccgcctcttgggtttgggtaattgttgtgcctcggcctccctctgcctcttgggcttgggcgattgttccacctcatccgccctccgcctcttgggtttcggtgattgttccacctcatccaccctccacctcttgggtttgggtggtttttccgcctcggcctcctgagtagctaagggaggagtcttgagattatcatccactgagggtggaagaggagagggtggaagagggacaaagagacagtccttcagattatcatncactgagggt

SEQ ID NO: 2153 - DNA, 204 bp, Homo sapiens
  misc_feature 150, 151, 167, 168, 190: n = A,T,C or G
caaagactgccttcctgcaccaagtaaagaagtgactcttgaaatactgggtggaatttctttatccaacataggaccgatgcgctcgcagatttgcaaaagatgatcaggagccacatgcttattggacaagaccaactcctcgtagcnnctgttgtgctcgttgnnctcccagtccaatctcttcggnaacaactggtacct

SEQ ID NO: 2154 - DNA, 234 bp, Homo sapiens
  misc_feature 11, 12: n = A,T,C or G
acagctgtgtnntaaagatgccttctggtgaatttgcacgtatatgccgagatctcagccatattggagatgctgttgtaatttcctgtgcaaaagacggagtgaaattttctgcaagtggagaacttggaaatggaaacattaaattgtcacagacaagtaatgtcgataaagaggaggaagctgttaccatagagatgaatgaaccagttcaactaacttttgcactgaggt

SEQ ID NO: 2155 - DNA, 159 bp, Homo sapiens
  misc_feature 6, 7, 77: n = A,T,C or G
tgaggnncccccctcagctcctggggctcctgctactctggctccgaggtgccagatgtggcatccagatgacccantctccatcctccctgtctgcatctgtaggagacagagtcaccatcacttgccgggcaagtccgaccattagcagctatttaa

SEQ ID NO: 2156 - DNA, 327 bp, Homo sapiens
  misc_feature 9, 10, 181, 223, 262, 306: n = A,T,C or G
acagattgnncacatatctagtctcatcaaactctccaaggccgacgtggaaaggaaattatcacagatgattcttgacaagaaatttcatgggattttggaccagggggagggtgtcctgattattttcgatgaacccccagtagataaaacttacgaagctgctctggaaacaattcanaacatgagcaaagtagtggattccctctacaacaaagccaanaaactgacatagagttggatctgtagcggtcctttgganagtgtgtgtggccgggagagtgaaaccttgggggaaaatgctangagattcttttttctttttgt

SEQ ID NO: 2157 - DNA, 62 bp, Homo sapiens
cgttgccctgctgatttgctgatacgcccattattgatgtttcgcgcccctatcgagtttga

SEQ ID NO: 2158 - DNA, 341 bp, Homo sapiens
acagggtttactctcagaaacctacctggaagcccatcggatcgtgaagatgaacaagagtgaggatgatgagtctggggctggagagctcaccagggaggagctgaggcaaattgcagaggaggatttctacgaaaagctggcagcttcaatcgccccagaaatatacgggcatgaagatgcgaagaaggcactgctgctcctgctagtcgggggtgtggaccagtctcctcgaggcatgaaaatccggggcaacatcaacatctgtctgatgggggatcctggtgtggccaagtctcagctcctgtcatacattgatcgactggcgcctcgcagccagt

SEQ ID NO: 2159 - DNA, 274 bp, Homo sapiens
  misc_feature 13: n = A,T,C or G
accattcccagantttcaggggcatcgtgggtttggtctagtgattgaaaacacaagaacagagagatccagctgaaaaagagtgatcctcaatatcctaactaactggtcctcaactcaagcagagtttcttcactctggcactgtgatcatgaaacttagtagaggggattgtgtgtattttatacaaatttaatacaatgtcttacattgataaaattcttaaagagcaaaactgcattttatttctgcatccacattccaatcatattag

SEQ ID NO: 2160 - DNA, 585 bp, Homo sapiens
  misc_feature 572: n = A,T,C or G
gctgcccaggccacttacagtggtctggagagccagtcagtgagtggctgttacggggccggctacagtgggcagaacagcatgggtggctatgactagttttgttaggaacatttgagttacttcaatcattttcacaggcagccaacaagcaattaagagcagttataatagaggaagctgggggacccattttgcaccatgagtttgtgaaaaatctggattaaaaaattacctcttcagtgttttctcatgcaaaattttcttctagcatgtgataatgagtaaactaaaactattttcagcttttctcaattaacattttggtagtatacttcagagtgatgttatctaagtttaagtagtttaagtatgttaaatgtggatcttttacaccacatcacagtgaacacactggggagacgtgcttttttggaaaactcaaaggtgctagctccctgattcaaagaaatatttctcatgtttgttcattctagtttatattttcatttaaaatcctttaggttaagtttaagcttttttaaaagttagttttgagaattgagacacantactaatactgta

SEQ ID NO: 2161 - DNA, 268 bp, Homo sapiens
  misc_feature 14, 50, 110, 111, 165: n = A,T,C or G
actgccggctggtnaatggaacctcgcagtcatttatcatcagacctcangaagaaggtgaacgggctttgccatcaataccaaagttggccaacagcgaaaagcaaggnntgcggacacacgccgtctctgtgtcagaaacagatgattatgctgagattatanatgaagaagatacttacaccatgccctcaaccagggattatgagattcaaagagaaagaatagaacttggacgatgtattggagaaggccaatttggagatgt

SEQ ID NO: 2162 - DNA, 171 bp, Homo sapiens
  misc_feature 13: n = A,T,C or G
acttcccctggantaaaaacaggaaatacaatttatgtttatacgtggttttagatatgactcaatatacatagattttaactttatggtttggtattacttttttaaaggagctcaatagaaattcaaatctcactttaagaccatgaatttcaagttgcaatgaagtgt

SEQ ID NO: 2163 - DNA, 223 bp, Homo sapiens
  misc_feature 5, 57, 108, 109, 125: n = A,T,C or G
ttccnttaaaaactactacttgagaaagaaatctttccacaaatagcataaaactgnagaatgatgaaaggatttgggaaagctttacaaaagcttaattccaattgnntcttcctgagggcggnggcaaagggtatttccttccttctctgggatatccctgtctccctccacgatcatctcgttctgggtggatacccaccaggcccagctagcatctggt

SEQ ID NO: 2164 - DNA, 529 bp, Homo sapiens
  misc_feature 31, 133, 283, 361, 405, 464, 494, 500: n = A,T,C or G
acacacacatggggaacacgccacagcttanatgtgacaaagttccttctcatatgactgttccctcaaggtaagactaagatgggagggggagaaaaagaatcctaaaaaagccaatttttaaaaattctgntttggctgattttgtgctataatgggtagctgatttctaaaaatcatatttcttcaaagagttttatatcgaaaggaagactaaatgtaatgtgcctttccttataatccaggaaaacaactgtggtatttcaaaaattctaaaaatatntactttcatgaaatagtaactatttcactacaaacctatttttcactaaatacacacatttcctaatcctggagcctnctgggaaaagcagtgggttctccctgggtcttgcaagactccantgttcacaggagagtgtggggaatagcttcaccccgtctcctgggatgggctttgtcanaggtcacgtgcagagacgctatcagacttncaccangcatgtttaagcaattaccccatacttgt

SEQ ID NO: 2165 - DNA, 277 bp, Homo sapiens
acaccaggggttggaaaaaccacactaggcaaagaacttgcgtcaaaatcaggactgaaatacattaatgtgggtgatttagctcgagaagagcaattgtatgatggctatgatgaagagtatgactgtcccattttagatgaagacagagtagttgatgagttagataaccaaatgagagaaggtggagttattgttgattaccatggttgtgatttcttccctgaacgctggtttcatatagtttttgtgctgagaacagataccaatgtattgt

SEQ ID NO: 2166 - DNA, 231 bp, Homo sapiens
ctggcttgtgatcataatgccaactatagataaggcaagtagtagcctagtagttaactgaagtttcaagttagtcatgtatagtcagtttttattatcatgtgaataaaataaaattgttttccttttcttttcattcagaaaagttctaggaactattttggtgcacaaccacattatagattatgcttgggtgatatgccatttgtagctgggaaggtgagttggtca

SEQ ID NO: 2167 - DNA, 350 bp, Homo sapiens
acagtaaaattaacacttccgttacaggaaatgtatgacgcaaataatataaaattaaaaggtgaaaaaaaggtgacactggtttcctaagatacaatttactctttacaaccagggtccacaggtccaggctgcagagcggcagcaggaagcagagcctcccacctgcttctgggggacctggtaataaaaatcagcccatgatggcgctatggcctctcagacaccacacgctgcctaaacacctagagctctggaaatagtcaacaggagagtgatttccatgggggaaattttaaataagatgcacatgggacaggcgatagaaagtttgccaagttaaatttggt

SEQ ID NO: 2168 - DNA, 406 bp, Homo sapiens
ttcccaagtgttttcattcagtgatcaggactgaacacagaggactcaccatggagtttgggctgagctggattttccttgctgctattttaaatggtgtccagtgtgaggtgcagctggtggagtctgggggaggcttagtaaagcctggggggtccctaacactctcctgtgcagcctctggattcactttcagtgacgcctggatgagctgggtccgccaggctccagggaaggggctggagtgggttggccgtattaaaagcacaactgatggtgggacaacagactacgctgcacccgtgcaaggcagattcaccatctcaagagatgattcagaagacacgttgtttctgcaaatgagcagcctgaaaaccgaggacacagccgtgtattactgtacctg

SEQ ID NO: 2169 - DNA, 57 bp, Homo sapiens
  misc_feature 13: n = A,T,C or G
gtacaagcttttnctttttttttttttttttttttcccttttttttttttttttttt

SEQ ID NO: 2170 - DNA, 320 bp, Homo sapiens
accagctgaatagcccagcttgcagtatagttatgtttcagtctgcagtgtgtttagcattcccttgtcaaagtgcttgactgcatgctggaaactttgtatttttgaagcggcaaactctgttctctggaatgctctgaagttatggctgggacctatcccctcacatctaatgaatgaattataaaatgtatatgtctatgaagcttcggggtagtgcctgtaatcagaaaacaacttagaacccttttgtttgtttccaattgagtcattactgcctgccactaagaaacgtgcttgaatctaataagtatgtgtgt

SEQ ID NO: 2171 - DNA, 186 bp, Homo sapiens
acagccgccttctaggccgtaacggaattcctgaaggttggagactccatagaagtggacaaaggctgctgccaccaccaggacatggaaaatctgatgagactggaaccatatgtcaaattttccaggaaagaagcgctcaggaattcgagcagcataaaaggccagctccagtgatgtacctcg

SEQ ID NO: 2172 - DNA, 275 bp, Homo sapiens
  misc_feature 104: n = A,T,C or G
cagctatctaatgattgccctgacggtggtaggatgcatcttcatggttattgagggcaagaaggctgcccaaagacacgagactttaacaagcttgaacttanaaaagaaagctcgtctgaaagaggaagcagctatgaaggccaaaacagagtagcagaggtatccgtgttggctggattttgaaaatccaggaattatgttataacgtgcctgtattaaaaaggatgtggtatgaggatccatttcataaagtatgatttgcccaaacctgt

SEQ ID NO: 2173 - DNA, 565 bp, Homo sapiens
acttgaaacctagagttgcgttttcacttgagaagacacactttggaaacacctatccaacagactacaaatataggctattaaattaaaaatctggtttcaaaataatacccacttaggttggaaatatctttctccaaactcagatccaacttttgaattgtttggtatcaaaggcaaagttagagggacttgggtttaaaaactaaaattacaagtgagtgcttaaaaaaaaacaactcaaaacatctttttatcaaataagggacacacacacacaaaaggcaaacgatgatatctacatgcttggactgggagagcagctcccaggctcccctggagggatgttctctcaaacctcagtaaactgagtttgtcattgaactttgaacctggtagtgagctcagcaatctacctggtccaagtcccccattttagaggtgaagaaattgaagtccacagcgactttgtccagggtgaaaagcagagccagggcacagcccagatgctcagcccacccagagcccttctgagacatcacactgtggtcacacgacggcagct

SEQ ID NO: 2174 - DNA, 337 bp, Homo sapiens
acaggttatcttcagtgtgtcttggcggatgagttgtgtcagtgctacaatggagttctcttgtccacggagagcagtgttgcagtgtatggaatgctaaatcttaccccaaagggcaagcaggctccaggtggccatgagctgagttgtgacttctgggaactaattgggttggcccctgctggaggagctgacaacctgatcaatgaggagtctgacgttgatgtccagctcaacaacagacacatgatgatccgaggagaaaacatgtccaaaatcctaaaagcacgatccatggtcaccaggtgctttagagatcacttctttgatagggggt

SEQ ID NO: 2175 - DNA, 224 bp, Homo sapiens
acaacaaggggatcatgggtgaagacacctacccctaccagggcaaggatggttattgcaagttccaacctggaaaggccatcggctttgtcaaggatgtagccaacatcacaatctatgacgaggaagcgatggtggaggctgtggccctctacaaccctgtgagctttgcctttgaggtgactcaggacttcatgatgtatagaacgggcatctactccagt

SEQ ID NO: 2176 - DNA, 58 bp, Homo sapiens
  misc_feature 23: n = A,T,C or G
actataaaaagatttggctacanatacaaaacatctttgcgataaaactgacaacgta

SEQ ID NO: 2177 - DNA, 222 bp, Homo sapiens
acgaatttgggtcccagccttgttgggttgtcagccatggacatggatttcaacccctggagaaaacgatgtcattgttcagcagctgagagcccaggcgtccgcggcgacttgccgtctctccattccactgcctgttgcagagtttttctgtaactaagggggttgaggttattgtagacgttagattgcgggcaccgccagggattttgcagcgcttca

SEQ ID NO: 2178 - DNA, 244 bp, Homo sapiens
  misc_feature 19: n = A,T,C or G
actgcaatcacaatgccanatggtgtttatgggctatttgtgtaagtaagtggtaagatgctatgaagtaagtgtgtttgttttcatcttatgaaaactcttgatgcatgtgcttttgtatggaataaattttggtgcaatatgatgtcattcaactttgcattgaattgaattttggttgtatttatatgtattatacctgtcacgcttctagttgcttcaaccattttataaccatttttgt

SEQ ID NO: 2179 - DNA, 264 bp, Homo sapiens
accttgagctcctcaaagactcactcaacgagtatgcatatgcagcagagctagcgggcttgagctatgatctccaaaataccatctatgggatgtatctttcagtgaaaggttacaatgacaagcagccaattttactaaagaagattattgagaaaatggctacctttgagattgatgaaaaaagatttgaaattatcaaagaagcatatatgcgatctcttaacaatttccgggctgaacagcctcaccagcatgccatgt

SEQ ID NO: 2180 - DNA, 371 bp, Homo sapiens
ttctgaatgtctgaagaaactgcaaaagtgcaattccaaaagccaaggtgagaaagaaatgtatacgctgggaatcactaattttcccattcctggagagcctggttttccacttaacgcaatttatgccaaacctgcaaacaaacaggaagatgaagtgatgagagcctatttacaacagctaaggcaagagactggactgagactttgtgagaaagttttcgaccctcagaatgataaacccagcaagtggtggacttgctttgtgaagagacagttcatgaacaagagtctttcaggacctggacagtgaagggagcccgggcagccaccgtctccagagccctgggcagcattttccagcaagatgt

SEQ ID NO: 2181 - DNA, 408 bp, Homo sapiens
cacgcacaggctgaggccaggcatctggtatatgaatcagacaaaaacaaggatgagaagctaactaaagaggaaatattggagaactggaacatgtttgttggaagccaagctaccaattacggggaagatctcacaaaaaatcatgatgagctttgatagacactcaccagaatatggcagactgtcataggcattctgttattgtcttggattgttgctacaattgtctaatttacagcagttgtgatcccacaaaaagcaagtttatacctcagattggggtataaaaattgtttttcgctcagtatttactggaaaatggacatcactagtctttcagtaagatttctctcaaaacacgtgaaaaccttggtaaattgcaattctttctggggatatattggt

SEQ ID NO: 2182 - DNA, 329 bp, Homo sapiens; identical to SEQ ID NO: 1146

SEQ ID NO: 2183 - DNA, 299 bp, Homo sapiens
accctccctcacacttgggaagatctccatgaaaaagataagagcacgaactgctttggagataatgatcctattgatgtttgcgaaataggctcaaagattctttcttgtggagaagttattcatgtgaagatccttggaattttggctcttattgatgaaggtgaaacagattggaaattaattgctatcaatgcgaatgatcctgaagcctcaaagtttcatgatattgatgatgttaagaagttcaaaccgggttacctggaagctactcttaattggtttagattatataaggt

SEQ ID NO: 2184 - DNA, 602 bp, Homo sapiens
  misc_feature 522, 546, 570, 579, 585: n = A,T,C or G
gtggagaaagcggctctgggtctagattgagggatactccccctttccaccatgggcaagaagggcaaagttggcaagagccgacgagacaagttttatcacttggcgaaggagacgggttaccgttcccgatctgctttcaagctgatccagctcaatcgccgctttcagttcctgcagaaagcccgagccttgctggacctgtgtgctgcgccagggggatggctgcaggtagctgccaagtttatgcctgtatccagccttattgtgggagtggacctggttccaatcaagcctctccccaatgtggtgactctccagcaggacatcacaacagaacgttgtaggcaggccctgaggaaggagctgaagacctggaaggttgatgttgtgctcaatgatggggcccccaacgttggggctagctgggtccatgatgcttactcacaagcccatttgacactgatggctctacgtttggcttgtgactttttggcccgtggtggcagcttcatcacaaangttttccgttctcgtgactatcancctctgctatggatctttcagcanctgttccgncgtgtncaggccaccaagcccca

SEQ ID NO: 2185 - DNA, 293 bp, Homo sapiens
  misc_feature 214: n = A,T,C or G
aatcacttgcccatcatctctgcgggcagcgaactgtgtctacagcaacctgtggagcggaaactgtgatctgccctagcgctctcttccagaagatgccctccaatcctttccaccctattccctaactctcgggacctcgtttgggagtgttctgtgggcttggccttgtgtcagagctgggagtagcatggactctgggtttcatatccanctgagtgagagggtttgagtcaaaagcctgggtgagaatcctgcctctccccaaacattaatcaccaaagtattaatgt

SEQ ID NO: 2186 - DNA, 347 bp, Homo sapiens
  misc_feature 11, 51, 146, 160, 228, 249, 253, 263, 273, 274, 283, 284,298, 299, 313: n = A,T,C or G
acttttatatnatgattttttaaatgcccaaaggactagtttgaaagcttnttttaaaaagaattcctctaatatgactttatgtgagaagggataatacatgatcaaataaactcagttttttatggttactgtaaaaagactgngtaaggcagctcancaccatgcttctcgtaaaagcagcttcaattatccactggggttatcttttgacaacttgccattatntgatgttacacaattcaatancaancaagtttganacaatcgcannttaaaagcnngaaccatttaacannaagtggaataattnaagataaagcacttcttcccaaagggaattatca

SEQ ID NO: 2187 - DNA, 221 bp, Homo sapiens
  misc_feature 19, 20, 21, 147, 150: n = A,T,C or G
cgatgtactaccaaatgannnagtttaaatgcttgtaacaaacgtgttatccaaaacagcacaatatgatgatgctaagacttacaaaattaacctaatttacagtattgtcaaacatgatttcatacaaacttgaataaacaccgnatntaaactaggtcaaacaactaccgagttcaaataattgatatggaagtattttggtaaagtgcccatagtga

SEQ ID NO: 2188 - DNA, 198 bp, Homo sapiens
aactggctttaccaatcttgaaatttgaccacaagtgtcttatatatgcagatctaatgtaaaatccagaacttggactccatcgttaaaattatttatgtgtaacattcaaatgtgtgcattaaatatgcttccacagtaaaatctgaaaaactgatttgtgattgaaagctgcctttctatttacttgagtcttgt

SEQ ID NO: 2189 - DNA, 129 bp, Homo sapiens
actggccggggtcggcctccatgttcaggttctcaatgtgtagctctgaccggccctgcgaggaactcacgaagaacctgttctcggagccgttcatgagggccttgtcctcagagtcagtgatcttgt

SEQ ID NO: 2190 - DNA, 473 bp, Homo sapiens
  misc_feature 44, 120, 121, 148, 165, 229, 240, 261, 279, 281, 290, 347,423, 436, 441, 470: n = A,T,C or G
acacaatggtttattaaaggaatgtatggcccacatcaacctancaaggattctactggtaaaccttcctatggccaaaggaaaaacaagcaggagttgagtggctggggtggggtgcanncaatggagagagggcagaagggtgtanaagctgaaggggtctanaagcttactcctgagtttcttccttctgtcttcaaatctttacttcttatggccaaagacccanctgtttcatangctggagatgcactcttctanactgctcgagacagccananacaggggangagggaagaaggatactgtggaaagggatggcggggcaaacatttagagctagaagncactactgggccaatgctaaagtttctgtctctaagcctaaaaaagccagtgtagtagggcccttatcactcttantttgctaggtttnccctntgaaataatgagcagatttagccaggctngca

SEQ ID NO: 2191 - DNA, 334 bp, Homo sapiens
  misc_feature 9, 116, 137, 187, 188, 264, 287, 290, 292, 301, 302, 307: n = A,T,C or G
atctatggntgccatctgcagattcttaaaatacaagatgaggatttcctcacacacaacttagtgggaactttccatgttctgttaagcctttcggtgtttttttgatctgtgtncttttttttttaaatagcagnaatccaactttaaaaaaatgcagcactaaaaaaataactagtccttattnncatgcaggactaactgcaggcagcacatttgtatcttgcttaagttgttgactttggagtcaagtttttattacangtgtcatgattgccaatactgtnttntntaagtgaannatggntgctttgactttggatctaatcaagat

SEQ ID NO: 2192 - DNA, 163 bp, Homo sapiens
  misc_feature 1, 17, 27, 85, 98, 136: n = A,T,C or G
ntactggctgtggactntccagggacncctcctgcagaagaacaacaaggaccgcttctgccagctgctgtggcggccccggccncccacactcctgngccaggaacagatcaagcaaattaaaaaggatctgaanaaatactctaagatctttgaacagaag

SEQ ID NO: 2193 - DNA, 362 bp, Homo sapiens
  misc_feature 6, 8, 295, 358: n = A,T,C or G
ccagancnacctataacagaccaagacacgacatctagccctgaatctgcaggaaaaatccaagctggagagtgagctagccaactttgggcctcgcattaatgatatcaagaggatcattcagagccgagagagggaaatgaaagacttgaaggagaagatgaaccaggtagaggatgaggtgtttgaagagttttgtcgggagattggtgtgcgcaacatccgggagtttgaggaagaaaaggtgaaacggcagaatgaaatcgccaagaagcgtttggagtttgagaatcangaagactcgcttgggcattcagttggatttttgaaaagaaccaactgaaggaggaccaagatnaagt

SEQ ID NO: 2194 - DNA, 205 bp, Homo sapiens
acccagtgcaggaagagtttccacaccagggggaattgtattctgcatggcaaaatccacacaggagagacaccctatctgtgcggccagtgtggaaaaagcttcacccagagagggagtctggctgtgcaccagcgaagctgctcacagaggctcaccctttgaccactttcctgaagagaagttctctttatgaattaagagt

SEQ ID NO: 2195 - DNA, 317 bp, Homo sapiens
  misc_feature 11: n = A,T,C or G
acagtggaaancatctttcatgtttccttcattatacgggatggttttgcaagaataagacttgaccaagaccgactgccagtaatagagcctgttagtattaatgaagaaaatgagggatttgaacataacacacaagttagaaatcaaggaattatagctttgagttaccgtgactgggaggagattgtgaagacctttgagatttcagagcctgtgattactccaagtcagaggcagcagaagccaagtgcttgatgctagctgaaggactcaaatggatagtgaagtccaaaacggaaagcggcatgtattgt

SEQ ID NO: 2196 - DNA, 343 bp, Homo sapiens
acaaccagaaaatagtgtgggatattgaattatgggaggctctgactgtctcgggtgtcagcttaacattccacagatggggggttagtttttatatcctataatacaaagcatattaaatggcaatatggagtcagtcctgcatttaatgtcttgaacattttaaattacttctattaccatgttgttttttagtagaattgtttcctaaagaaaaccactctttgatcatggctctctctgccagaattgtgtgcactctgtaacatctttgtggtagtcctgttttcctaataactttgttactgtgctgtgaaagattacagatttgaacatgtagtgt

SEQ ID NO: 2197 - DNA, 252 bp, Homo sapiens
  misc_feature 6, 8, 14, 17: n = A,T,C or G
cagagncnccaaanatnacactaatataatgtatgggaaggcgtaatataaaaggcctccaccaactgcctgaagcacggttaaaattgggaagaagtaaagtgcagcataaatacttttaaatcgatcagattcccctaacccacatgcaatcttcttcaccagaagaggtcggagcagcatcattaataccaagcagaatgcgtaatagataaatacaatggtatatagtgggtagacggcttcatgagt

SEQ ID NO: 2198 - DNA, 204 bp, Homo sapiens
  misc_feature 12: n = A,T,C or G
actttaggaccntgacagacaaatcgattacaaggtcaattcccaggatttcttcagggtgtgttcaggagtgcagatgttctttggatgacctttctactaaattagacctctgaaggagaaagctacttgccagaggctttccctgagagcattaggttgggcaaaatctgactaaaatttaattactaaatgaaagtgtgt

SEQ ID NO: 2199 - DNA, 304 bp, Homo sapiens
  misc_feature 164, 175, 176, 249, 250, 275: n = A,T,C or G
gtaccttgtgaaacaatttgtttactgaataaaaaatattgcttaagatttaaagcaattaaagcaaaataagttgctgaagggagatcatatgagttaaatacaggcttttttttaatctgtaattgatttacatttgattttaagaagacactgtttacatnaggtcaccacnnagcagatttacatacaaccttcaattgcggaaaaacaaagtttctttttgatccaaacacaaagaaaaacttnnttgtgttttttttaatgatcttttncttgatcataaaaaaaagtaaaaaatgca

SEQ ID NO: 2200 - DNA, 522 bp, Homo sapiens
ccgcatcctagccgccgactcacacaaggcagagttgccatggagaaaattccagtgtcagcattcttgctccttgtggccctctcctacactctggccagagataccacagtcaaacctggagccaaaaaggacacaaaggactctcgacccaaactgccccagaccctctccagaggttggggtgaccaactcatctggactcagacatatgaagaagctctatataaatccaagacaagcaacaaacccttgatgattattcatcacttggatgagtgcccacacagtcaagctttaaagaaagtgtttgctgaaaataaagaaatccagaaattggcagagcagtttgtcctcctcaatctggtttatgaaacaactgacaaacacctttctcctgatggccagtatgtccccaggattatgtttgttgacccatctctgacagttagagccgatatcactggaagatattcaaaccgtctctatgcttacgaacctgcagatacagcttctgttgct

SEQ ID NO: 2201 - DNA, 282 bp, Homo sapiens
  misc_feature 14, 219, 270: n = A,T,C or G
actgaggaaatctnttgtaaagtgagctttgggtataacttagccccatcattatttagagaatagaggaggaagaaagaggaaggattttaaaggcagacaatgacagaccattcaggataggtggggttttaaagggagataaacacagtctcatcaactaaggagagatttgctgcagtaaataggatgagggaaatagtctgtgggatgcaagcnaaggaagcagggtgccttagacactgagtggagccagaaagatcatgcggnctttttccaagt

SEQ ID NO: 2202 - DNA, 217 bp, Homo sapiens
  misc_feature 13, 14, 90, 189: n = A,T,C or G
acctattttgganntagacttgaaaagaaagtgctagcacagtttgtgttgtggatttgctacttccatagtttacttgacatggttcanactgaccaatgcatttttttcagtgacagtctgtagcagttgaagctgtgaatgtgctaggggcaagcatttgtctttgtatgtggtgaattttttcantgtaacaacattatctgaccaatagtac

SEQ ID NO: 2203 - DNA, 597 bp, Homo sapiens
acactgattcagtatccacagtccagaaggagttcttgaacatctagttcatatccccaaaaaatgtgaaaagactcctaaacacccaagttattacacaatgggaagctgatattggcttgtattaaaatccaggtgaatatcaaacataatcacagccttaacagtggtgctagaataagtgatgacaatatgtgcacagctgtatacagatcactattaaacacaggaacaaaatgccacttgatgcatatcaaaaagccaatttgaatatatttatttcatttacattgatacagtattagaagggactgaatataattatggagactgctgcaaacatttgatgccactaagtattctattaagcatcaggcatgcacagtagttaccttttaaagtttctcatgtatatatcttaacacatatatcttaagctacaatatgtttaaagcatttagtcattttaaacccaaatattttaattgacctatgtctaaatggagaaaaacagaaacttcctcctgtctcaatacccgatggcaatattaaaccttactccccaaattgatatttaaacttatttatgtcatcttt

SEQ ID NO: 2204 - DNA, 259 bp, Homo sapiens
acgtgggtgaggggatggaggaaggcgagttttcagaggcccgtgaagatatggctgcccttgagaaggattatgaggaggttggtgtggattctgttgaaggagagggtgagaaagaaggagaggaatactaattatccattccctttggccctgcagcatgtcatgctcccagaatttcagcttcagcttaactgacagacgttaaagctttctggttagattgttttcacttggtgatcatgtcttttccatgtgt

SEQ ID NO: 2205 - DNA, 465 bp, Homo sapiens
  misc_feature 10, 11: n = A,T,C or G
acaactattnnattagtcttctactgccctacagctacagagcaggcacctctgtgggcatatattgcttgtgcctgtggccttttcatttaccagtctttggatgctattgatgggaaacaggcaagaagaaccaatagtagttctcctctgggagaactttttgatcatggctgtgattcactatcaacagtttttgtggttcttggaacttgtattgcagtgcagctggggacaaaccctgattggatgtttttttgttgttttgcggggacatttatgttctattgtgcgcactggcaaacgtatgtttctggaacattgcgatttggaataattgatgtgactgaagtgcagatcttcataataatcatgcatttgctggcagtgattggaggaccacctttttggcaatctatgattccagtgctgaatattcaaatgaaaatttttcctgcactttgt

SEQ ID NO: 2206 - DNA, 379 bp, Homo sapiens
acagaattgccaagggttaccagacctctccagatctgcgattgacctggttgcagaacatggcaggcaagcactcagaacgaagcaatcatgctgaagctgcacagtgtctagtccactcagcagcacttgttgctgaatatttgagcatgctggaggaccggaaatatcttcctgtgggatgtgtaacatttcagaatatttcatctaatgttttagaagaatctgcggtctcagatgatgtggtatctccagatgaagaaggtatctgctctggaaaatactttactgagtcaggacttgtgggattactggaacaagcagctgcttccttctctatggctggcatgtatgaagcagttaatgaagtttacaaagt

SEQ ID NO: 2207 - DNA, 101 bp, Homo sapiens
  misc_feature 9, 10: n = A,T,C or G
acctgctgnnagtctgcctatgccagaaggattaaggaggggaggttacccaagaaacaaagcctacatgccgcttacagcccccgttggatggttgctca

SEQ ID NO: 2208 - DNA, 255 bp, Homo sapiens
  misc_feature 22: n = A,T,C or G
acaatgaattcctcgatttttnaaggctgaccctgtttccttggttaacaatttcaatttaggccttataggaaaaaacgtaagggatcctttatctgcctccaactaggtaagttatttgataccactgacagcttaaaaagtaatgtcctaacctttctgaagattctggttgccataaccatgctactacagtctgttgttagtttgctctattaaaactaattggtctggagaaaacctacctgcagttgt

SEQ ID NO: 2209 - DNA, 550 bp, Homo sapiens
  misc_feature 12, 472, 488, 495: n = A,T,C or G
accaactctaanccacactggactaattcagatggagggatactttccaaactaatcagatgcctaataaagtgttggagtatacgtgtggacatgtagaagggatagttgcgaatgtctgaccttgtggaaatttccaaagatgtctacccataaacggtaattggcagtgttcatgactgaattaaatttagtcttttaaatcttgtcagacaaggatcccagagtgattctggcacatcactcttcttatggataatctaccaccagaagataaacctcagtaaatctgagatagttttaaaattacaagaatatttagaaacttcaagtgagtaagtatataaaatgtaagctggaaaaagcagcctttgaaatgagacactagaatatctttggtagataaaaactctattatttcaaggagagagtttttgtttctggaaagtgctaagtttgtgtaacataaaangcattactaaattcangtgacanggtaaaagaatattttttttaagaaataataaaaccatgcatattggattcctaa

SEQ ID NO: 2210 - DNA, 357 bp, Homo sapiens
  misc_feature 334: n = A,T,C or G
tacccccacaaaatctgcattgtccatgtgagtaaagtaaaataattcctgttatttttttctgttagaaataagtatggaggatatgtttttaaaaatttatgagttaattgaaatatccatatataacaagtgactttctcacaatatatatgatgtgatatatagggagatagtttcactttcatcatattttatacgttgattctgaactatagaaaaataataaatgggattttaattatagctcttagttgggaaagaaatatagagagatgtgggatttgaatgcccatgaaagacattttattttacttgaatatattcttgcttnactttaccctccataatatgttg

SEQ ID NO: 2211 - DNA, 387 bp, Homo sapiens
  misc_feature 13, 333: n = A,T,C or G
acttacgctatcntcagaatataaagaactgcctcaaaatagaaggccatttagctgtgcagcctactttcactgaaggttcattgtttttcctgttacatggagaagaatgtgcccagaaaataagagctttagttgatcaccatgatgcagaggtgaaggaaaaggttgtaacaataatacccaaaatctgattggtcatatttttccaaagagtaatgcagtctggatataaatgtattttctgtcttccttataaggggattctcccagctgctaaatttaaacagtaaatatcacattttgtcattaacacagctataacttgccgtngttctcaggatttattttggactattttgatgccaagtgaatataagagtttgt

SEQ ID NO: 2212 - DNA, 276 bp, Homo sapiens
  misc_feature 190, 191: n = A,T,C or G
acctagcataaaaactctgcagagaagtattcccaataaggaaatagcattgaaatgttaaatacaatttctgaaagttatgttttttttctatcatctggtataccattgctttatttttataaattattttctcattgccattggaatagatatctcagattgtgtagatatgctatttaaataattnntcaggaaatactgcctgtagagttagtatttctatttttatataatgtttgcacactgaattgaagaattgttggttttttcttt

SEQ ID NO: 2213 - DNA, 268 bp, Homo sapiens
actcctcgggcaacagccttttcaccagctcaaatccaaacttgcggatgagcttggtgaacaggttccgaagcttcatgcggaagtgccgccgcatgtcatctgaaagcttcccaatggcttccatcaccagctgcacatgtttggccaggtgcgccacgtccatgacagtcactgccaccttgatgaagcccagtgcagacttgaccacgtcacgggtgcgggaggccagaagcaggcacacattctccagcagctgctccactgt

SEQ ID NO: 2214 - DNA, 507 bp, Homo sapiens
  misc_feature 13, 14, 403, 488: n = A,T,C or G
acaaaaggcttanntaagttttctttgctgaatttgatggatgtttttctgttgtgtaatctgatatgccagtttgcttaaaacatttgccaacacattatgaagttattaaatttaagggacagaggtagtatagttagatatactttctcttaggaaaaataatgggcaaaaatttttgttgcaacttttcatatatattttccccttaccaattgttttatccttatagtattgtaggccctgaaagtagaatttttctttaacttattttgagatttgagatttaaattttatgtattgtttacagtcagagtaaatcactggatttcttttgtttgttttgatttgctctgttttattcagtcaaatctagagttcgaatcctctgctaaagaatttncatccactggtgtaaacagtgaaaggtattttgcttgttgaaaaaaaaaactggcaaagtgaaaagatacagtcaaaaaatctanaatttctttaattttgctt

SEQ ID NO: 2215 - DNA, 126 bp, Homo sapiens
acagaaggggaaagactttaagcaaccatgatgaccttggaaactggttatgtgccttatttaacatataattataattaaagttaactaaagtctattccatcttcctttactatggttgcaagt

SEQ ID NO: 2216 - DNA, 290 bp, Homo sapiens
  misc_feature 15, 16: n = A,T,C or G
acacataaagtttannctggttatgacaaaagcctatagttgtgtttcttgaactataaagaaaacaaattttggcagtctttaagtatatatagcttaaaatataatttttagcatttggcaccatatgtatgccattatatttgattttgcattactgtttcacaatgaagctttctttaaggctttgatttttatgattatgaaagaaataaggcacaaccacagtttttctttcttaaatttcatcactgttgatgtggttcttttgtgttaaaaaaaagtgcaac

SEQ ID NO: 2217 - DNA, 333 bp, Homo sapiens
tgattgatatccagaccaggatggctgggcgagcattggagcttctttatctgccagagaataagccctgttacctgctggatattggctgtggcactgggctgagtggaagttatctgtcagatgaagggcactattgggtgggcctggatatcagccctgccatgctggatgaggctgtggaccgagagatagagggagacctgctgctgggggatatgggccagggcatcccattcaagccaggcacatttgatggttgcatcagcatttctgctgtgcagtggctctgtaatgctaacaagaagtctgaaaaccctgccaagcgcctgt

SEQ ID NO: 2218 - DNA, 335 bp, Homo sapiens
  misc_feature 60, 61, 199, 298: n = A,T,C or G
acaaaaaaaaccttacataaattaagaatgaatacatttacaggcgtaaatgcaaaccgnntccaactcaaagcaagtaacagtccacggtgttctggccaaagacatcagctaagaaaggaaactgggtcctacggcttggactttccaaccctgacagacccgcaagacaaaacaactggttcttgccagcctctanagaaatcccagaacactcagccctgacacgttaataccaaggggaacagttaaccttcaatacaaggtcaaaatcagcaacaaagttctacaatccagngctgatatcagatacaagcttcaaggacaatttcttt

SEQ ID NO: 2219 - DNA, 536 bp, Homo sapiens
  misc_feature 494: n = A,T,C or G
actcactcaccctacctccagggcatagtcagtctgggctgagatccccatgatcagatatttgatggaaagtcctgaaaggccaatgagttggatggcaagaatgcaggcagtagctgctggataaaataggctacagccacctcagatgctttcagtgctctgtctgaggatgtgtatatgcatatgcaaactcgacccccgttcctgcccagataatggctcaataactctgaggctggttgctcagcctctgagggcaatacaggcatttaaaaaattaagatgaccaggcacagtggctcacgcctgtgatctcggcactttgggagactgaggtgggagcatcacttgagaccgggagtttgggaccaggctgggcaacacagggagacccctctctacaaaaacatttttaaaaaattagctgggtgtggtgatgcatgcctgtggtcccagttacttgggaggctgacgtgggtggctcacttgancacaggagtttgaggctgcagtgacctatgaccacatcactg

SEQ ID NO: 2220 - DNA, 347 bp, Homo sapiens
  misc_feature 337: n = A,T,C or G
acccatggtaaatgtaaatatactgtgtctcttttgggagagccttttagtagaggagtcttatatgagtctctacataagtagtttcacttgagttttgcagtttgaaatcttaaaggagctttaattgacatttattataccaattaagcttggaatggggcaatggatgcatttcccaaaacgtgtgaaagcactaacagcttatattgctgaatgagaatctcctgggtgtaatttagccacttagggaactgcgtgaacactcccaggccattatgatgctgttacagcttcagtgtataaatgcatgagtattctttctgttctgttttgngctctcttgt

SEQ ID NO: 2221 - DNA, 224 bp, Homo sapiens
acgaactccacggcggtggggcgctaactagcagggacccctgcaagtgttggtcgggggcctcgagctgcctgagctgacacgaggggaggggtctgtgtagccaacaggtgaccgaagggcttgcctgcccacagcttacttggccaaggggtttctgaagttcctgccggcaaacttagccttgctgcccagctcctcttcaattctgaggagctggttgt

SEQ ID NO: 2222 - DNA, 270 bp, Homo sapiens
acagagaaattcacaagtgtaaaaatattgcacattgacaaataccaagaatttttgcgtatgtttatattgtattgttctaaataatgggtagcctgtgaaataagatcttgccacccatgtaataatagtagtaatactatagttaaaatggctgtaagaatagttttataaaagtgaatacacagatctattgtatttgaaacataactttgacaattattagtgtgaccaaagtattaggcggttttcatacatttttcaccttgt

SEQ ID NO: 2223 - DNA, 394 bp, Homo sapiens
ctgcagaacaaatcaagcacatccttgctaatttcaaaaactaccagttctttattggtgaaaacatgaatccagatggcatggttgctctattggactaccgtgaggatggtgtgaccccatatatgattttctttaaggatggtttagaaatggaaaaatgttaacaaatgtggcaattattttggatctatcacctgtcatcataactggcttctgcttgtcatccacacaacaccaggacttaagacaaatgggactgatgtcatcttgagctcttcatttattttgactgtgatttatttggagtggaggcattgtttttaagaaaaacatgtcatgtaggttgtctaaaaataaaatgcatttaaactcaaaaaaaaaaaaaaaaaaa

SEQ ID NO: 2224 - DNA, 508 bp, Homo sapiens
  misc_feature 409, 447, 475, 493: n = A,T,C or G
acagataaggtaaggagcaatcctgtgaaagagttcataaatatcttttattttctaaaattcaatatacataagacattggtgtgattttacatttcttacattagaaataatggctcttgaactacttatttctatttgctatcccttagtttgctcttcagtctcttccattgtagtttttaaaagatgcttgcaattttttattctgagttgtaggtaatgcacataccgggggcattttttttttgtctccttaaaattttagagactttctggatttttgacttggaactggttcttcatccatcatcttatcttatataacccccttatatataacacccgggtgtgttctgagagtctgttcttaatttctttcctcaccaaatctctttcccaatgctgntgcaagaacatgtcctcctctgccatctgccattcctncttttcttactccacctacagtttcttnccttaaatattctccagngcagaatggctcaca

SEQ ID NO: 2225 - DNA, 129 bp, Homo sapiens
  misc_feature 14, 16, 92, 93, 103, 104: n = A,T,C or G
gaaagggagccacncnactgattggagggccctatcttgtgagtggggcatctgttggactttccacctggtcatatactctgcagctgttnnaatgtgcaannacttggggacagcatgagcttgctg

SEQ ID NO: 2226 - DNA, 490 bp, Homo sapiens
  misc_feature 477: n = A,T,C or G
gcgagtcgccgctgcagccctagtgactgcggcctgcatcccgattgtcttctcctccaaggtctacatgattacctgaagtttaataagtaagaccatgaattatggcatttcttaaatgaagcgttcaagaagtgagagaatgtcatagaaaataaatgatttttaagttatgtctattaatctgactgtagatatatatatttacctccttagtaatgcaagaagtgtttgtgggaagcagagaagcaagcaactgtatttcttgttctcacctaagcattactggaggataagccacatcagtctacaaagaggttttcatacaaacataataagatgtaaatggaccaaaagtgaagcacattcttgcagtaagcactgttactctccaagcaaccatggtttacatattgggattttgaaacttagcacttctgctcccaagggacttacaaaagtgaacatttgtatgtnccgtattaaaagt

SEQ ID NO: 2227 - DNA, 441 bp, Homo sapiens
  misc_feature 2, 13, 85, 299, 317, 349, 392, 393, 408, 411, 413, 418: n = A,T,C or G
tnctaaaacttgnttttcttaaaaaatagttgttgtaacattaaaccataacctaatcagtgtgttcactatgcttccacactanccagtcttctcacacttcttctggtttcaagtctcaaggcctgacagacagaagggcttggagattttttttctttacaattcagtcttcagcaacttgagagctttcttcatgttgtcaagcaacagagctgtatctgcaggttcgtaagcatagagacgatttgaatatcttccagtgatatcggctctaactgtcagagatgggtctgcanagataaatgaagcaaaanggaatggaatggtttgttttcaaacaacctgnatttattgccccggggagctgaagttcatgtattcatgtcctnngagggaatggagtgngtntncactnacaggagctctgatccatccact

SEQ ID NO: 2228 - DNA, 388 bp, Homo sapiens
  misc_feature 7, 16, 193, 370: n = A,T,C or G
tagcctncaaatgganggtgactggccctggctcctgctatgagaagataaccagcctcattttctcagtgccccagaggtctaggataggatttctaaactggaatcatccttaatcaccttgaagatcccttaagaggcatttgactggtgctgccgtctgtgtcctcaaagcaatgctggtggcagcgtnctgtgtacctgcccgagcggccgcccgggcaggtactaaaatagatgtaaaaaattctggatttgaaaactgttggtttttaaaagagaaatatttttaaattcttattttaggatgaggatatgttcatgaaatttgtaagtgaagatcttcatcgggtgtgcacttttaacaggnttgaacctattcatatag

SEQ ID NO: 2229 - DNA, 261 bp, Homo sapiens
  misc_feature 155: n = A,T,C or G
aggtactatagggtaaatacgggccctatttcaaagatttttaggggaattaattctaggacgatgggcatgaaactgtggtttgctccacagatttcagagcattgaccgtagtatacccccggtcgtgtagcggtgaaagtggtttggtttanacgtccgggaattgcatctgtttttaagcctaatgtggggacagctcatgagtgcaagacgtcttgtgatgtaattattatacgaatgggggcttcaatcgggagt

SEQ ID NO: 2230 - DNA, 466 bp, Homo sapiens
  misc_feature 453: n = A,T,C or G
gttttggtgtggatcgattctgtttgggacacactggcactgcagtagggaagctgttgacgcttggaggacttgggatttggtggtttgttgaccttattttgctaattactggagggctgatgccaagtgatggcagcaactggtgcactgtttactaaaaagagctgccatcatggcccagggaggcgggtgaaagctccgtcttctgaattcatctctacaggctcaaaactcctctttgatatcagacctgatgttattttccttcttttggagggcatttgtttggttaagaaggcttctttggactttggaatttcaacccagattttaccttgcagacggaatgacaagcaaaaagtgttgtggggaatcaaatttgttcctttcctcatgcacaaaacataaaggatagtggcgagtttacaagctgtggatgggtttccatantcttcctttctgt

SEQ ID NO: 2231 - DNA, 371 bp, Homo sapiens
  misc_feature 202, 218, 249, 275, 362: n = A,T,C or G
actgaaaaaaatgtctaaggcctttacagaaacatttttagtaatgaggatgagaactttttcaaatagcaaatatatattggcttaaagcatgaggctgtcttcagaaaagtgatgtggacataggaggcaatgtgtgagacttgggggttcaatattttatatagaagagttaataagcacatggtttacatttactcanctactatatatgcagngtggtgcacattttcacagaattctggcttnattaagatcattatttttgctgcgtngcttacagacttagcatattagttttttctactcctacaagtgtaaattgaaaaatctttatattaaaaaagtaaactgttatgaanctgctatgt

SEQ ID NO: 2232 - DNA, 2520 bp, Homo sapiens
gtgggaccgctgaccgcgcggctgctccgctctccccgctccaagcgccgatctgggcacccgccaccagcatggacgctcgccgcgtgccgcagaaagatctcagagtaaagaagaacttaaagaaattcagatatgtgaagttgatttccatggaaacctcgtcatcctctgatgacagttgtgacagctttgcttctgataattttgcaaacacgaggctgcagtcagttcgggaaggctgtaggacccgcagccagtgcaggcactctggacctctcagggtggcgatgaagtttccagcgcggagtaccaggggagcaaccaacaaaaaagcagagtcccgccagccctcagagaattctgtgactgattccaactccgattcagaagatgaaagtggaatgaattttttggagaaaagggctttaaatataaagcaaaacaaagcaatgcttgcaaaactcatgtctgaattagaaagcttccctggctcgttccgtggaagacatcccctcccaggctccgactcacaatcaaggagaccgcgaaggcgtacattcccgggtgttgcttccaggagaaaccctgaacggagagctcgtcctcttaccaggtcaaggtcccggatcctcgggtcccttgacgctctacccatggrgagagccagtttkgarkmtmwgtacatgttggtgagaaagaggaagaccgtggatggctacatgaatgaagatgacctgcccagaagccgtcgctccagatcatccgtgacccttccgcatataattcgcccagtggaagaaattacagaggaggagttggagaacgtctgcagcaattctcgagagaagatatataaccgttcactgggctctacttgtcatcaatgccgtcagaagactattgataccaaaacaaactgcagaaacccagactgctggggcgttcgaggccagttctgtggcccctgccttcgaaaccgttatggtgaagaggtcagggatgctctgctggatccgaactggcattgcccgccttgtcgaggaatctgcaactgcagtttctgccggcagcgagatggacggtgtgcgactggggtccttgtgtatttagccaaatatcatggctttgggaatgtgcatgcctacttgaaaagcctgaaacaggaatttgaaatgcaagcataatatctggaaaatttgctgcctgccttctacttctcaaatctttcttgtaaaagtttccaattttttcactgaaacctgagttaaaaatcttgatgatcagcctgtttcataagaaactccaatcaagttaatcttagcagacatgtgtttctggagcatcacagaaggtatattgctagttacactttgccctcctgcagtttcttctctgctcccaacccccatctcatagcatccccctctatttccaatgctcctctccaaccgcttagtttctgaatttcttttaaattacagttttatgaaagcatattttatttacttggtgttgaaatagccctcataaaacctaagcacttggaaacacaataatagtattaactaactagatctattgaatttcagagaagagccttctaacttgtttacacaaaaacgagtatgatttagcattcatactagttgaaatttttaatagaatcaaggcacaaaagtcttaaaaccatgtggaaaaattaggtaattattgcagattgatgtctctcaatcccatgtattgcgcttatgttacaagttgttgtcacagttgagacttaatttctcctaatttcttctgcccgaagggtaagtggtgcgtccagcttacacratcataattcaaaggttggtgggcaatgtaatacttaattaaaataatgatggaagagctatctggagattatgagtaagctgatttgaattttcagtataaaactttagtataattgtagtttgcaaagtttatttcagttcacatgtaaggtattgcaaataaattcttggacaattttgtatggaaacttgatattaaaaactagtctgtggttctttgcagtttcttgtaaatttataaaccaggcacaaggttcaagtttagattttaagcacttttataacaatgataagtgcctttttggagatgtaacttttagcagtttgttaacctgacatctctgccagtctagtttctgggcaggtttcctgtgtcagtattccccctcctctttgcattaatcaaggtatttggtagaggtggaatctaagtgtttgtatgtccaatttacttgcatatgtaaaccattgctgtgccattcaatgtttgatgcataattggaccttgaatcgataagtgtaaatacagcttttgatctgtaatgcttttatacaaaagtttattttaataataaaatgtttgttctaacttgtctgctttttttaaaaataatcttactgtacttaattctaattttttcctcatatttaaataaaaggccatttccaccttttctaaaaa

SEQ ID NO: 2233 - DNA, 3411 bp, Homo sapiens
  misc_feature 1554, 1555, 1556, 1557, 1558, 1559, 1560, 1561, 1562, 1563,1564, 1565, 1566, 1567, 1568, 1569, 1570, 1571, 1572, 1573,1574, 1575, 1576, 1577, 1578: n = A,T,C or G
gtgggaccgctgaccgcgcggctgctccgctctccccgctccaagcgccgatctgggcacccgccaccagcatggacgctcgccgcgtgccgcagaaagatctcagagtaaagaagaacttaaagaaattcagatatgtgaagttgatttccatggaaacctcgtcatcctctgatgacagttgtgacagctttgcttctgataattttgcaaacacgaggctgcagtcagttcgggaaggctgtaggacccgcagccagtgcaggcactctggacctctcagggtggcgatgaagtttccagcgcggagtaccaggggagcaaccaacaaaaaagcagagtcccgccagccctcagagaattctgtgactgattccaactccgattcagaagatgaaagtggaatgaattttttggagaaaagggctttaaatataaagcaaaacaaagcaatgcttgcaaaactcatgtctgaattagaaagcttccctggctcgttccgtggaagacatcccctcccaggctccgactcaaccagttcttgtttatatacagtagtgttttgggcacacctaaggtcgatctgtgttgtatttaaaaatctaatttctttatttgtgtggccttctagacaaacgaaggggacccagaggaaaccccctgacagatctctggatgatcctccttgaatcctgggcagtttggtctctccttgctgtgctcctgtggcactaaactccttttgattggttctttctttccttcccagctagactaagcccctcatgggcaggtaatgaagattgaaaacttttttctgttctccagtgtgagcacattcctcctacatggtagatgtgcaatagatgtttttaaaattggagaatgaaaataaaagaagaaaatcacaatttcttatcaagttgtagcttggtatcatacacaattgcattctgaggaattaaggtggtaccttagggagatttggtgtgtctgctgtgatagaaaagatttctttttcctagctttccctgaggaaaggaaagatggaaagagggaagccatacagatatccctctgttttgcagtgtagaaactgaatgtgtttctacagggtcaagagacatcagagaaatttttttttttttagaacagaagatcatttcttacatcttcattaagtaaaagaataaatagctcatctctcaagttgaaagaaactgggcttggtattattacaaaagcaaaattaaaatggccatataggttttaggctcattttgccatgcattatgcaaaggacaaagaaaaagaaaaaatagagctctctttacttaaaacatccttaaggagaagctatgaattccccaaagtactacttctctttattatggaataaatggattcccttatacgtgctttgtttagcaatcaaggagaccgcgaaggcgtacattcccgggtgttgcttccaggagaaaccctgaacggagagctcgtcctcttaccaggtcaaggtcccggatcctcgggtcccttgacgctctacccatnnnnnnnnnnnnnnnnnnnnnnnnntacatgttggtgagaaagaggaagaccgtggatggctacatgaatgaagatgacctgyccagaagccgtcgctccagatcatccgtgacccttccgcatataattcgcccagtggaagaaattacagaggaggagttggagaacgtctgcagcaattctcgagagaagatatatwaccgttcactgggctctacttgtcatcaatgccgtcagaagactattgataccaaaacaaactgcagaaacccagactgctggggcgttcgaggccmgttctgtggcccctgccttcgaaaccgttatggtgaagaggtcagggatgctctgctggatccgaactggcattgcccgccttgtcgaggaatctgcaactgcagtttctgccggcagcgagatggacggtgtgcgactggggtccttgtgtatttagccaaatatcatggctttgggaatgtgcatgcctacttgaaaagcctgaaacaggaatttgaaatgcaagcataatatctggaaaatttgctgcctgccttctacttctcaaatctttcttgtaaaagtttccaattttttcactgaaacctgagttaaaaatcttgatgatcagcctgtttcataagaaactccaatcaagttaatcttagcagacatgtgtttctggagcatcacagaaggtatattgctagttacactttgccctcctgcagtttcttctctgctcccaacccccatctcatagcatccccctctatttccaatgctcctctccaaccgcttagtttctgaatttcttttaaattacagttttatgaaagcatattttatttacttggtgttgaaatagccctcataaaacctaagcacttggaaacacaataatagtattaactaactagatctattgaatttcagagaagagccttctaacttgtttacacaaaaacgagtatgatttagcattcatactagttgaaatttttaatagaatcaaggcacaaaagtcttaaaaccatgtggaaaaattaggtaattattgcagattgatgtctctcaatcccatgtattgcgcttatgttacaagttgttgtcacagttgagacttaatttctcctaatttcttctgcccgaagggtaagtggtgccgtccagcttacacaatcataattcaaaggttggtgggcaatgtaatacttaattaaaataatgatggaagagctatctggagattatgagtaagctgatttgaattttcagtataaaactttagtataattgtagtttgcaaagtttatttcagttcacatgtaaggtattgcaaataaattcttggacaattttgtatggaaacttgatattaaaaactagtctgtggttctttgcagtttcttgtaaatttataaaccaggcacaaggttcaagtttagattttaagcacttttataacaatgataagtgcctttttggagatgtaacttttagcagtttgttaacctgacatctctgccagtctagtttctgggcaggtttcctgtgtcagtattccccctcckctttgcattaatcaaggtatttggtagaggtggaatctaagtgtttgtatgtccaatttacttgcatatgtaaaccattgctgtgccattcaatgtttgatgcataattggaccttgaatcgataagtgtaaatacagcttttgatctgtaatgcttttatacaaaagtttattttaataataaaatgtttgttctaacttgtctgctttttttaaaaataatcttactgtacttaattctaattttttcctcatatttaaataaaaggccatttccaccttttct

SEQ ID NO: 2234 - DNA, 1116 bp, Homo sapiens
atggacgctcgccgcgtgccgcagaaagatctcagagtaaagaagaacttaaagaaattcagatatgtgaagttgatttccatggaaacctcgtcatcctctgatgacagttgtgacagctttgcttctgataattttgcaaacacgaggctgcagtcagttcgggaaggctgtaggacccgcagccagtgcaggcactctggacctctcagggtggcgatgaagtttccagcgcggagtaccaggggagcaaccaacaaaaaagcagagtcccgccagccctcagagaattctgtgactgattccaactccgattcagaagatgaaagtggaatgaattttttggagaaaagggctttaaatataaagcaaaacaaagcaatgcttgcaaaactcatgtctgaattagaaagcttccctggctcgttccgtggaagacatcccctcccaggctccgactcacaatcaaggagaccgcgaaggcgtacattcccgggtgttgcttccaggagaaaccctgaacggagagctcgtcctcttaccaggtcaaggtcccggatcctcgggtcccttgacgctctacccatggrgagagccagtttkgarkmtmwgtacatgttggtgagaaagaggaagaccgtggatggctacatgaatgaagatgacctgcccagaagccgtcgctccagatcatccgtgacccttccgcatataattcgcccagtggaagaaattacagaggaggagttggagaacgtctgcagcaattctcgagagaagatatataaccgttcactgggctctacttgtcatcaatgccgtcagaagactattgataccaaaacaaactgcagaaacccagactgctggggcgttcgaggccagttctgtggcccctgccttcgaaaccgttatggtgaagaggtcagggatgctctgctggatccgaactggcattgcccgccttgtcgaggaatctgcaactgcagtttctgccggcagcgagatggacggtgtgcgactggggtccttgtgtatttagccaaatatcatggctttgggaatgtgcatgcctacttgaaaagcctgaaacaggaatttgaaatgcaagcataa

SEQ ID NO: 2235 - protein, 371 aa, Homo sapiens
  VARIANT 197, 201, 203, 204: Xaa = Any Amino Acid
MDARRVPQKDLRVKKNLKKFRYVKLISMETSSSSDDSCDSFASDNFANTRLQSVREGCRTRSQCRHSGPLRVAMKFPARSTRGATNKKAESRQPSENSVTDSNSDSEDESGMNFLEKRALNIKQNKAMLAKLMSELESFPGSFRGRHPLPGSDSQSRRPRRRTFPGVASRRNPERRARPLTRSRSRILGSLDALPMXRASXEXXYMLVRKRKTVDGYMNEDDLPRSRRSRSSVTLPHIIRPVEEITEEELENVCSNSREKIYNRSLGSTCHQCRQKTIDTKTNCRNPDCWGVRGQFCGPCLRNRYGEEVRDALLDPNWHCPPCRGICNCSFCRQRDGRCATGVLVYLAKYHGFGNVHAYLKSLKQEFEMQA

SEQ ID NO: 2236 - DNA, 21 bp, Artificial Sequence
  Primer
cacgacgttgtaaaacgacgg

SEQ ID NO: 2237 - DNA, 20 bp, Artificial Sequence
  Primer
cacaggaaacagctatgacc

SEQ ID NO: 2238 - DNA, 1176 bp, Homo sapiens
atgggcagcagccatcatcatcatcatcacagcagcggcctggtgccgcgcggcagccatatggacgctcgccgcgtgccgcagaaagatctcagagtaaagaagaacttaaagaaattcagatatgtgaagttgatttccatggaaacctcgtcatcctctgatgacagttgtgacagctttgcttctgataattttgcaaacacgaggctgcagtcagttcgggaaggctgtaggacccgcagccagtgcaggcactctggacctctcagggtggcgatgaagtttccagcgcggagtaccaggggagcaaccaacaaaaaagcagagtcccgccagccctcagagaattctgtgactgattccaactccgattcagaagatgaaagtggaatgaattttttggagaaaagggctttaaatataaagcaaaacaaagcaatgcttgcaaaactcatgtctgaattagaaagcttccctggctcgttccgtggaagacatcccctcccaggctccgactcacaatcaaggagaccgcgaaggcgtacattcccgggtgttgcttccaggagaaaccctgaacggagagctcgtcctcttaccaggtcaaggtcccggatcctcgggtcccttgacgctctacccatggaggaggaggaggaagaggataagtacatgttggtgagaaagaggaagaccgtggatggctacatgaatgaagatgacctgcccagaagccgtcgctccagatcatccgtgacccttccgcatataattcgcccagtggaagaaattacagaggaggagttggagaacgtctgcagcaattctcgagagaagatatataaccgttcactgggctctacttgtcatcaatgccgtcagaagactattgataccaaaacaaactgcagaaacccagactgctggggcgttcgaggccagttctgtggcccctgccttcgaaaccgttatggtgaagaggtcagggatgctctgctggatccgaactggcattgcccgccttgtcgaggaatctgcaactgcagtttctgccggcagcgagatggacggtgtgcgactggggtccttgtgtatttagccaaatatcatggctttgggaatgtgcatgcctacttgaaaagcctgaaacaggaatttgaaatgcaagcataa

SEQ ID NO: 2239 - protein, 391 aa, Homo sapiens
MGSSHHHHHHSSGLVPRGSHMDARRVPQKDLRVKKNLKKFRYVKLISMETSSSSDDSCDSFASDNFANTRLQSVREGCRTRSQCRHSGPLRVAMKFPARSTRGATNKKAESRQPSENSVTDSNSDSEDESGMNFLEKRALNIKQNKAMLAKLMSELESFPGSFRGRHPLPGSDSQSRRPRRRTFPGVASRRNPERRARPLTRSRSRILGSLDALPMEEEEEEDKYMLVRKRKTVDGYMNEDDLPRSRRSRSSVTLPHIIRPVEEITEEELENVCSNSREKIYNRSLGSTCHQCRQKTIDTKTNCRNPDCWGVRGQFCGPCLRNRYGEEVRDALLDPNWHCPPCRGICNCSFCRQRDGRCATGVLVYLAKYHGFGNVHAYLKSLKQEFEMQA

SEQ ID NO: 2240 - DNA, 1370 bp, Homo sapiens
gatagcggtttgactcacggggatttccaagtctccaccccattgacgtcaatgggagtttgttttggcaccaaaatcaacgggactttccaaaatgtcgtaataaccccgccccgttgacgcaaatgggcggtaggcgtgtacggtgggaggtctatataagcagagctcgtttagtgaaccgtcagatctctagaagctgggtaccatggacgctcgccgcgtgccgcagaaagatctcagagtaaagaagaacttaaagaaattcagatatgtgaagttgatttccatggaaacctcgtcatcctctgatgacagttgtgacagctttgcttctgataattttgcaaacacgaggctgcagtcagttcgggaaggctgtaggacccgcagccagtgcaggcactctggacctctcagggtggcgatgaagtttccagcgcggagtaccaggggagcaaccaacaaaaaagcagagtcccgccagccctcagagaattctgtgactgattccaactccgattcagaagatgaaagtggaatgaattttttggagaaaagggctttaaatataaagcaaaacaaagcaatgcttgcaaaactcatgtctgaattagaaagcttccctggctcgttccgtggaagacatcccctcccaggctccgactcacaatcaaggagaccgcgaaggcgtacattcccgggtgttgcttccaggagaaaccctgaacggagagctcgtcctcttaccaggtcaaggtcccggatcctcgggtcccttgacgctctacccatggaggaggaggaggaagaggataagtacatgttggtgagaaagaggaagaccgtggatggctacatgaatgaagatgacctgcccagaagccgtcgctccagatcatccgtgacccttccgcatataattcgcccagtggaagaaattacagaggaggagttggagaacgtctgcagcaattctcgagagaagatatataaccgttcactgggctctacttgtcatcaatgccgtcagaagactattgataccaaaacaaactgcagaaacccagactgctggggcgttcgaggccagttctgtggcccctgccttcgaaaccgttatggtgaagaggtcagggatgctctgctggatccgaactggcattgcccgccttgtcgaggaatctgcaactgcagtttctgccggcagcgagatggacggtgtgcgactggggtccttgtgtatttagccaaatatcatggctttgggaatgtgcatgcctacttgaaaagcctgaaacaggaatttaaatgcaagcataggcggccgctgactacaaggacgacgatgacaagtgagtcgaggccgg

SEQ ID NO: 2241 - DNA, 1116 bp, Homo sapiens
atggacgctcgccgcgtgccgcagaaagatctcagagtaaagaagaacttaaagaaattcagatatgtgaagttgatttccatggaaacctcgtcatcctctgatgacagttgtgacagctttgcttctgataattttgcaaacacgaggctgcagtcagttcgggaaggctgtaggacccgcagccagtgcaggcactctggacctctcagggtggcgatgaagtttccagcgcggagtaccaggggagcaaccaacaaaaaagcagagtcccgccagccctcagagaattctgtgactgattccaactccgattcagaagatgaaagtggaatgaattttttggagaaaagggctttaaatataaagcaaaacaaagcaatgcttgcaaaactcatgtctgaattagaaagcttccctggctcgttccgtggaagacatcccctcccaggctccgactcacaatcaaggagaccgcgaaggcgtacattcccgggtgttgcttccaggagaaaccctgaacggagagctcgtcctcttaccaggtcaaggtcccggatcctcgggtcccttgacgctctacccatggaggaggaggaggaagaggataagtacatgttggtgagaaagaggaagaccgtggatggctacatgaatgaagatgacctgcccagaagccgtcgctccagatcatccgtgacccttccgcatataattcgcccagtggaagaaattacagaggaggagttggagaacgtctgcagcaattctcgagagaagatatataaccgttcactgggctctacttgtcatcaatgccgtcagaagactattgataccaaaacaaactgcagaaacccagactgctggggcgttcgaggccagttctgtggcccctgccttcgaaaccgttatggtgaagaggtcagggatgctctgctggatccgaactggcattgcccgccttgtcgaggaatctgcaactgcagtttctgccggcagcgagatggacggtgtgcgactggggtccttgtgtatttagccaaatatcatggctttgggaatgtgcatgcctacttgaaaagcctgaaacaggaatttgaaatgcaagcatta

What is claimed is:

1. An isolated polynucleotide comprising a sequence selected from the group consisting of:
(a) sequences provided in SEQ ID NOs:1-2234, 2238 and 2240-2241;
(b) complements of the sequences provided in SEQ ID NOs:1-2234, 2238 and 2240-2241;
(c) sequences consisting of at least 20 contiguous residues of a sequence provided in SEQ ID NOs:1-2234, 2238 and 2240-2241;
(d) sequences that hybridize to a sequence provided in SEQ ID NOs:1-2234, 2238 and 2240-2241, under moderately stringent conditions;
(e) sequences having at least 75% identity to a sequence of SEQ ID NOs:1-2234, 2238 and 2240-2241;
(f) sequences having at least 90% identity to a sequence of SEQ ID NOs:1-2234, 2238 and 2240-2241; and
(g) degenerate variants of a sequence provided in SEQ ID NOs:1-2234, 2238 and 2240-2241.

2. An isolated polypeptide comprising an amino acid sequence selected from the group consisting of:
(a) sequences encoded by a polynucleotide of claim 1;
(b) sequences having at least 70% identity to a sequence encoded by a polynucleotide of claim 1; and
(c) sequences having at least 90% identity to a sequence encoded by a polynucleotide of claim 1;
(d) sequences provided in SEQ ID NOs:2235 and 2239;
(e) sequences having at least 70% identity to a sequence provided in SEQ ID NOs:2235 and 2239;
(f) sequences having at least 90% identity to a sequence provided in SEQ ID NOs:2235 and 2239.

3. An expression vector comprising a polynucleotide of claim 1 operably linked to an expression control sequence.

4. A host cell transformed or transfected with an expression vector according to claim 3.

5. An isolated antibody, or antigen-binding fragment thereof, that specifically binds to a polypeptide of claim 2.

6. A method for detecting the presence of a cancer in a patient, comprising the steps of:
(a) obtaining a biological sample from the patient;
(b) contacting the biological sample with a binding agent that binds to a polypeptide of claim 2;
(c) detecting in the sample an amount of polypeptide that binds to the binding agent; and
(d) comparing the amount of polypeptide to a predetermined cut-off value and therefrom determining the presence of a cancer in the patient.

7. A fusion protein comprising at least one polypeptide according to claim 2.

8. An oligonucleotide that hybridizes to a sequence recited in SEQ ID NOs:1-2234, 2238 and 2240-2241 under moderately stringent conditions.

9. A method for stimulating and/or expanding T cells specific for a tumor protein, comprising contacting T cells with at least one component selected from the group consisting of:
(a) polypeptides according to claim 2;
(b) polynucleotides according to claim 1; and
(c) antigen-presenting cells that express a polynucleotide according to claim 1,
under conditions and for a time sufficient to permit the stimulation and/or expansion of T cells.

10. An isolated T cell population, comprising T cells prepared according to the method of claim 9.

11. A composition comprising a first component selected from the group consisting of physiologically acceptable carriers and immunostimulants, and a second component selected from the group consisting of:
(a) polypeptides according to claim 2;
(b) polynucleotides according to claim 1;
(c) antibodies according to claim 5;
(d) fusion proteins according to claim 7;
(e) T cell populations according to claim 10; and
(f) antigen presenting cells that express a polypeptide according to claim 2.

12. A method for stimulating an immune response in a patient, comprising administering to the patient a composition of claim 11.

13. A method for the treatment of a cancer in a patient, comprising administering to the patient a composition of claim 11.

14. A method for determining the presence of a cancer in a patient, comprising the steps of:
(a) obtaining a biological sample from the patient;
(b) contacting the biological sample with an oligonucleotide according to claim 8;
(c) detecting in the sample an amount of a polynucleotide that hybridizes to the oligonucleotide; and
(d) compare the amount of polynucleotide that hybridizes to the oligonucleotide to a predetermined cut-off value, and therefrom determining the presence of the cancer in the patient.

15. A diagnostic kit comprising at least one oligonucleotide according to claim 8.

16. A diagnostic kit comprising at least one antibody according to claim 5 and a detection reagent, wherein the detection reagent comprises a reporter group.

17. A method for inhibiting the development of a cancer in a patient, comprising the steps of:
(a) incubating CD4+ and/or CD8+ T cells isolated from a patient with at least one component selected from the group consisting of: (i) polypeptides according to claim 2; (ii) polynucleotides according to claim 1; and (iii) antigen presenting cells that express a polypeptide of claim 2, such that T cell proliferate;
(b) administering to the patient an effective amount of the proliferated T cells,
and thereby inhibiting the development of a cancer in the patient.
